(19) United States
(12) Patent Application Publication
(10) Pub. No.: US 2013/0116172 A1
(43) Pub. Date: May 9, 2013

(54) GLUCAGON SUPERFAMILY PEPTIDES EXHBITING G PROTEIN COUPLED RECEPTOR ACTIVITY

(71) Applicants: Richard D. Dimarchi, Carmel, IN (US); Lianshan Zhang, Princeton Junction, NJ (US)

(72) Inventors: Richard D. Dimarchi, Carmel, IN (US); Lianshan Zhang, Princeton Junction, NJ (US)

(73) Assignee: MARCADIA BIOTECH, INC., Nutley, NJ (US)

(21) Appl. No.: 13/697,017

(22) PCT Filed: May 10, 2011
(86) PCT No.: PCT/US11/35912

§ 371 Date: Nov. 9, 2012

Related U.S. Application Data
(60) Provisional application No. 61/334,433, filed on May 13, 2010.

(51) Int. Cl. C07K 14/605

(52) U.S. Cl. CPC C07K 14/605
USPC 514/5.3; 530/308; 514/11.7; 514/7.2

(57) ABSTRACT

Provided herein are glucagon superfamily peptides conjugated with GPCR ligands that are capable of acting at a G protein-coupled receptor. Also provided herein are pharmaceutical compositions and kits of the conjugates of the invention. Further provided herein are methods of treating a disease, e.g., a metabolic disorder, such as diabetes and obesity, comprising administering the conjugates of the invention.

### CROSS REFERENCE TO RELATED APPLICATIONS

[0001] This application claims priority to U.S. Provisional Patent Application No. 61/334,433, filed on May 13, 2010. The disclosure of this provisional application is hereby expressly incorporated by reference in its entirety.

### INCORPORATION BY REFERENCE OF MATERIAL SUBMITTED ELECTRONICALLY

[0002] Incorporated by reference in its entirety is a computer-readable amino acid sequence listing submitted concurrently herewith and identified as follows: One 870,716 byte ASCII (Text) file named “44632A_SeqListing,” created on Apr. 29, 2011.

### BACKGROUND OF THE INVENTION

[0003] 1. Field of the Disclosure

[0004] This invention provides glucagon superfamily peptides conjugated to G protein-coupled receptor ligands that are capable of acting at G protein-coupled receptors.

[0005] 2. Brief Description of Related Technology

[0006] Peptide-based drugs are highly effective medicines with a relatively short duration of action and variable therapeutic index. Activation of several G protein-coupled receptors (GPCRs), for example, GPR40, GPR119, GRP120, and GPR30 has been demonstrated to produce favorable effects on glucose homeostasis, food intake, body weight gain and possibly also β-cell preservation. Free fatty acids (FFAs) appear to stimulate insulin secretion through direct islet GPCR signaling and indirect stimulation of incretin secretion via receptor-mediated mechanisms. GPR40 and GPR119 are among the several receptors to play an important physiological role in insulin release. It is now known that both GPR40 and GPR119 are expressed in pancreatic β-cells and that activating these receptors stimulates insulin secretion in a glucose-dependent manner GPR120 is a receptor for unsaturated fatty acids, such as α-linoleic acid. Its expression has been found in both intestinal L cells and islets. Stimulation of GPR120 has been demonstrated to increase insulin levels and proliferation of β-cells. GPR30, a functional estrogen receptor, has been shown to be involved in glucose homeostasis and reduction of body weight in the DIO model in rodents. Compounds capable of activating these above-mentioned receptors could prove valuable agents for the treatment of type 2 diabetes and obesity. However, the ligands previously identified are generally low affinity agonists and may be of limited therapeutic use.

[0007] Pre-proglucagon is a 158 amino acid precursor polypeptide that is processed in different tissues to form a number of different proglucagon-derived peptides, including glucagon, glucagon-like peptide-1 (GLP-1), glucagon-like peptide-2 (GLP-2) and oxyntomodulin (OXM), that are involved in a wide variety of physiological functions, including glucose homeostasis, insulin secretion, gastric emptying, and intestinal growth, as well as the regulation of food intake. Glucagon is a 29-amino acid peptide that corresponds to amino acids 33 through 61 of pre-proglucagon, while GLP-1 is produced as a 37-amino acid peptide that corresponds to amino acids 72 through 108 of pre-proglucagon. GLP-1(7-36) amide or GLP-1(7-37) acid are biologically potent forms of GLP-1, that demonstrate essentially equivalent activity at the GLP-1 receptor.

[0008] Glucagon is used in the acute treatment of severe hypoglycemia. Oxyntomodulin has been reported to have pharmacological ability to suppress appetite and lower body weight. GLP-1 and GLP-1 receptor agonists are used as treatment for Type II diabetes. Exendin-4 is a peptide present in the saliva of the Gila monster that resembles GLP-1 in structure, and like glucagon and GLP-1, increases insulin release.

[0009] Gastric inhibitory polypeptide (GIP) is also known as a glucose-dependent insulinotropic peptide, and is a member of the secretin family of hormones. GIP is derived from a 153-amino acid proprotein encoded by the GIP gene and circulates as a biologically active 42-amino acid peptide. The GIP gene is expressed in the small intestine as well as the salivary glands and is a weak inhibitor of gastric acid secretion. In addition to its inhibitory effects in the stomach, in the presence of glucose, GIP enhances insulin release by pancreatic beta islet cells when administered in physiological doses. GIP is believed to function as an enteric factor that stimulates the release of pancreatic insulin and that may play a physiological role in maintaining glucose homeostasis.

[0010] Osteocalcin is a noncollagenous protein found in bone and dentin. It is secreted by osteoblasts and thought to play a role in mineralization and calcium ion homeostasis. Osteocalcin has also been reported to function as a hormone in the body, causing beta cells in the pancreas to release more insulin, and at the same time directing fat cells to release the hormone adiponectin, which increases sensitivity to insulin.

### SUMMARY OF THE INVENTION

[0011] Provided herein are glucagon superfamily peptides conjugated to G protein-coupled receptor ligands (“GPCR ligands”), preferably GPCR ligands involved in metabolism, including lipid metabolism or glucose homeostasis. These conjugates with plural activities are useful for the treatment of a variety of diseases.

[0012] The glucagon superfamily peptide conjugates of the invention can be represented by the following formula:

Q-L-Y

wherein Q is a glucagon superfamily peptide, Y is a GPCR ligand, and L is a linking group or a bond.

[0013] The glucagon superfamily peptide (Q) in some embodiments can be a glucagon related peptide that exhibits agonist activity at the glucagon receptor, agonist activity at the GLP-1 receptor, agonist activity at the GIP receptor, co-agonist activity at the glucagon and GLP-1 receptors, co-agonist activity at the glucagon and GIP receptors, co-agonist activity at the GLP-1 and GIP receptors, or tri-agonist activity at the glucagon, GIP, and GLP-1 receptors. In some embodiments, the glucagon related peptide exhibits antagonist activity at the glucagon, GLP-1 or GIP receptor. The activity of the glucagon related peptide at the glucagon receptor, at the GLP-1 receptor, or at the GIP receptor can be in accordance with any of the teachings set forth herein. In some specific embodiments, the glucagon related peptide exhibits at least 0.1% activity of native glucagon at the glucagon receptor, at least 0.1% activity of native GLP-1 at the GLP-1 receptor, or at least 0.1% activity of native GIP at the GIP receptor.

[0014] The GPCR ligand (Y) is wholly or partly non-peptidic and acts at a G protein-coupled receptor with an activity in accordance with any of the teachings set forth herein. In some embodiments the GPCR ligand has an EC₅₀ or IC₅₀ of about 1 mM or less, or 100 μM or less, or 10 μM or less, or 1 μM or less. In some embodiments, the GPCR ligand has a molecular weight of up to about 5000 daltons, or up to about 2000 daltons, or up to about 1000 daltons, or up to about 500 daltons. The GPCR ligand may act at any of the G protein-coupled receptors described herein or have any of the structures described herein. In preferred embodiments, the GPCR is involved in metabolism, including lipid metabolism and glucose homeostasis. In selected embodiments, the GPCR is a member of the rhodopsin-like family, e.g. GPR30, GPR40, GPR119 or GPR120.

[0015] In some embodiments, the glucagon related peptide has an EC₅₀ (or IC₅₀) at the glucagon receptor within about 100-fold, or within about 75-fold, or within about 50-fold, or within about 40-, 30-, 25-, 20-, 15-, 10- or 5-fold of the EC₅₀ or IC₅₀ of the GPCR ligand at its G protein-coupled receptor. In some embodiments, the glucagon related peptide has an EC₅₀ (or IC₅₀) at the GLP-1 receptor within about 100-fold, or within about 75-fold, or within about 50-fold, or within about 40-, 30-, 25-, 20-, 15-, 10- or 5-fold of the EC₅₀ or IC₅₀ of the GPCR ligand at its G protein-coupled receptor. In some embodiments, the glucagon related peptide has an EC₅₀ (or IC₅₀) at the GIP receptor within about 100-fold, or within about 75-fold, or within about 50-fold, or within about 40-, 30-, 25-, 20-, 15-, 10- or 5-fold of the EC₅₀ or IC₅₀ of the GPCR ligand at its G protein-coupled receptor.

[0016] In some aspects of the invention, prodrugs of Q-L-Y are provided wherein the prodrug comprises a dipeptide prodrug element (A-B) covalently linked to an active site of Q via an amide linkage. Subsequent removal of the dipeptide under physiological conditions and in the absence of enzymatic activity restores full activity to the Q-L-Y conjugate.

[0017] In some aspects of the invention, pharmaceutical compositions comprising the Q-L-Y conjugate and a pharmaceutically acceptable carrier are also provided.

[0018] In other aspects of the invention, methods are provided for administering a therapeutically effective amount of a Q-L-Y conjugate described herein for treating a disease or medical condition in a patient. In some embodiments, the disease or medical condition is selected from the group consisting of metabolic syndrome, diabetes, obesity, liver steatosis, and a neurodegenerative disease.

### BRIEF DESCRIPTION OF THE DRAWING

[0019] FIG. 1 presents an alignment of the amino acid sequences of various glucagon superfamily peptides or relevant fragments thereof. The amino acid sequence presented are GHRH (SEQ ID NO: 1619), PHI (SEQ ID NO: 1622), VIP (SEQ ID NO: 1620), PACAP-27 (SEQ ID NO: 1621), Exendin-4 (SEQ ID NO: 1618), GLP-1 (SEQ ID NO: 1603), Glucagon (SEQ ID NO: 1601), Oxyntomodulin (SEQ ID NO: 1606), GIP (SEQ ID NO: 1607), GLP-2 (SEQ ID NO: 1608) and Secretin (SEQ ID NO: 1624). The alignment shows how amino acid positions of glucagon can correspond to amino acid positions in other glucagon superfamily peptides.

### DETAILED DESCRIPTION OF THE INVENTION

### Definitions

[0020] In describing and claiming the invention, the following terminology will be used in accordance with the definitions set forth below.

[0021] The term “about” as used herein means greater or lesser than the value or range of values stated by 10 percent, but is not intended to designate any value or range of values to only this broader definition. Each value or range of values preceded by the term “about” is also intended to encompass the embodiment of the stated absolute value or range of values.

[0022] As used herein, the term “pharmaceutically acceptable carrier” includes any of the standard pharmaceutical carriers, such as a phosphate buffered saline solution, water, emulsions such as an oil/water or water/oil emulsion, and various types of wetting agents. The term also encompasses any of the agents approved by a regulatory agency of the US Federal government or listed in the US Pharmacopeia for use in animals, including humans.

[0023] As used herein the term “pharmaceutically acceptable salt” refers to salts of compounds that retain the biological activity of the parent compound, and which are not biologically or otherwise undesirable. Many of the compounds disclosed herein are capable of forming acid and/or base salts by virtue of the presence of amino and/or carboxyl groups or groups similar thereto.

[0024] Pharmaceutically acceptable base addition salts can be prepared from inorganic and organic bases. Salts derived from inorganic bases, include by way of example only, sodium, potassium, lithium, ammonium, calcium and magnesium salts. Salts derived from organic bases include, but are not limited to, salts of primary, secondary and tertiary amines. Pharmaceutically acceptable acid addition salts may be prepared from inorganic and organic acids. Salts derived from inorganic acids include hydrochloric acid, hydrobromic acid, sulfuric acid, nitric acid, phosphoric acid, and the like. Salts derived from organic acids include acetic acid, propionic acid, glycolic acid, pyruvic acid, oxalic acid, malic acid, malonic acid, succinic acid, maleic acid, fumaric acid, tartaric acid, citric acid, benzoic acid, cinnamic acid, mandelic acid, methanesulfonic acid, ethanesulfonic acid, p-toluene-sulfonic acid, salicylic acid, and the like.

[0025] As used herein, the term “treating” includes prophylaxis of the specific disorder or condition, or alleviation of the symptoms associated with a specific disorder or condition and/or preventing or eliminating said symptoms. For example, as used herein the term “treating diabetes” will refer in general to altering glucose blood levels in the direction of normal levels and may include increasing or decreasing blood glucose levels depending on a given situation.

[0026] As used herein an “effective” amount or a “therapeutically effective amount” of a glucagon peptide refers to a nontoxic but sufficient amount of the peptide to provide the desired effect. For example one desired effect would be the prevention or treatment of hypoglycemia, as measured, for example, by an increase in blood glucose level. An alternative desired effect for the glucagon peptides of the present disclosure would include treating hyperglycemia, e.g., as measured by a change in blood glucose level closer to normal, or inducing weight loss/preventing weight gain, e.g., as measured by reduction in body weight, or preventing or reducing an increase in body weight, or normalizing body fat distribution. The amount that is “effective” will vary from subject to subject, depending on the age and general condition of the individual, mode of administration, and the like. Thus, it is not always possible to specify an exact “effective amount.” However, an appropriate “effective” amount in any individual case may be determined by one of ordinary skill in the art using routine experimentation.

[0027] The term, “parenteral” means not through the alimentary canal but by some other route, e.g., subcutaneous, intramuscular, intraspinal, or intravenous.

[0028] As used herein the term “patient” without further designation is intended to encompass any warm blooded vertebrate domesticated animal (including for example, but not limited to livestock, horses, cats, dogs and other pets), mammals, and humans.

[0029] The term “isolated” as used herein means having been removed from its natural environment. In some embodiments, the analog is made through recombinant methods and the analog is isolated from the host cell.

[0030] The term “purified,” as used herein relates to the isolation of a molecule or compound in a form that is substantially free of contaminants normally associated with the molecule or compound in a native or natural environment and means having been increased in purity as a result of being separated from other components of the original composition. The term “purified polypeptide” is used herein to describe a polypeptide which has been separated from other compounds including, but not limited to nucleic acid molecules, lipids and carbohydrates.

[0031] As used herein, the term “peptide” encompasses a sequence of 2 or more amino acids and typically less than 50 amino acids, wherein the amino acids are naturally occurring or coded or non-naturally occurring or non-coded amino acids. Non-naturally occurring amino acids refer to amino acids that do not naturally occur in vivo but which, nevertheless, can be incorporated into the peptide structures described herein. “Non-coded” as used herein refer to an amino acid that is not an L-isomer of any of the following 20 amino acids: Ala, Cys, Asp, Glu, Phe, Gly, His, Ile, Lys, Leu, Met, Asn, Pro, Gln, Arg, Ser, Thr, Val, Trp, Tyr.

[0032] As used herein, “partly non-peptidic” refers to a molecule wherein a portion or all of the molecule is a chemical compound or substituent that has biological activity and that does not comprises a sequence of amino acids.

[0033] As used herein, “non-peptidic” refers to a molecule has biological activity and that does not comprise a sequence of amino acids.

[0034] As used herein, the terms “polypeptide” and “protein” are terms that are used interchangeably to refer to a polymer of amino acids, without regard to the length of the polymer. Typically, polypeptides and proteins have a polymer length that is greater than that of “peptides.” In some instances, a protein comprises more than one polypeptide chain covalently or noncovalently attached to each other.

[0035] Throughout the application, all references to a particular amino acid position by number (e.g., position 28) refer to the amino acid at that position in native glucagon (SEQ ID NO: 1601) or the corresponding amino acid position in any analogs thereof. For example, a reference herein to “position 28” would mean the corresponding position 27 for an analog of glucagon in which the first amino acid of SEQ ID NO: 1601 has been deleted. Similarly, a reference herein to “position 28” would mean the corresponding position 29 for a analog of glucagon in which one amino acid has been added before the N-terminus of SEQ ID NO: 1601.

[0036] As used herein an “amino acid modification” refers to (i) a substitution or replacement of an amino acid of the reference peptide (e.g. SEQ ID NOs: 1601, 1603, 1607) with a different amino acid (naturally-occurring or coded or non-coded or non-naturally-occurring amino acid), (ii) an addition of an amino acid (naturally-occurring or coded or non-coded or non-naturally-occurring amino acid) to the reference peptide (e.g. SEQ ID NOs: 1601, 1603, 1607) or (iii) a deletion of one or more amino acids from the reference peptide (e.g. SEQ ID NOs: 1601, 1603, 1607).

[0037] In some embodiments, the amino acid substitution or replacement is a conservative amino acid substitution, e.g., a conservative substitution of the amino acid at one or more of positions 1, 2, 5, 7, 8, 10, 11, 12, 13, 14, 16, 17, 18, 19, 20, 21, 24, 27, 28 or 29. As used herein, the term “conservative amino acid substitution” is the replacement of one amino acid with another amino acid having similar properties, e.g., size, charge, hydrophobicity, hydrophilicity, and/or aromaticity, and includes exchanges within one of the following five groups:

[0038] I. Small aliphatic, nonpolar or slightly polar residues:
[0039] Ala, Ser, Thr, Pro, Gly;

[0040] II. Polar, negative-charged residues and their amides and esters:
[0041] Asp, Asn, Glu, Gln, cysteic acid and homocysteic acid;

[0042] III. Polar, positive-charged residues:
[0043] His, Arg, Lys; Ornithine (Orn)

[0044] IV. Large, aliphatic, nonpolar residues:
[0045] Met, Leu, Ile, Val, Cys, Norleucine (Nle), homocysteine

[0046] V. Large, aromatic residues:
[0047] Phe, Tyr, Trp, acetyl phenylalanine

[0048] In some embodiments, the amino acid substitution is not a conservative amino acid substitution, e.g., is a non-conservative amino acid substitution.

[0049] As used herein the term “amino acid” encompasses any molecule containing both amino and carboxyl functional groups, wherein the amino and carboxyl groups are attached to the same carbon (the alpha carbon). The alpha carbon optionally may have one or two further organic substituents. For the purposes of the present disclosure designation of an amino acid without specifying its stereochemistry is intended to encompass either the L or D form of the amino acid, or a racemic mixture. However, in the instance where an amino acid is designated by its three letter code and includes a superscript number (i.e., Lys⁻¹), such a designation is intended to specify the native L form of the amino acid, whereas the D form will be specified by inclusion of a lower case d before the three letter code and superscript number (i.e., dLys⁻¹).

[0050] As used herein the term “hydroxyl acid” refers to an amino acid that has been modified to replace the alpha carbon amino group with a hydroxyl group.

[0051] As used herein the term “charged amino acid” refers to an amino acid that comprises a side chain that has a negative charge (i.e., deprotonated) or positive charge (i.e., protonated) in aqueous solution at physiological pH. For example negative-charged amino acids include aspartic acid, glutamic acid, cysteic acid, homocysteic acid, and homoglutamic acid, whereas positive-charged amino acids include arginine, lysine and histidine. Charged amino acids include the charged amino acids among the 20 coded amino acids, as well as atypical or non-naturally occurring or non-coded amino acids.

[0052] As used herein the term “acidic amino acid” refers to an amino acid that comprises a second acidic moiety (other than the alpha carboxylic acid of the amino acid), including for example, a side chain carboxylic acid or sulfonic acid group.

[0053] As used herein an “acylated” amino acid is an amino acid comprising an acyl group which is non-native to a naturally-occurring amino acid, regardless by the means by which it is produced. Exemplary methods of producing acylated amino acids and acylated peptides are known in the art and include acylating an amino acid before inclusion in the peptide or peptide synthesis followed by chemical acylation of the peptide. In some embodiments, the acyl group causes the peptide to have one or more of (i) a prolonged half-life in circulation, (ii) a delayed onset of action, (iii) an extended duration of action, (iv) an improved resistance to proteases, such as DPP-IV, and (v) increased potency at the glucagon superfamily peptide receptor.

[0054] As used herein, an “alkylated” amino acid is an amino acid comprising an alkyl group which is non-native to a naturally-occurring amino acid, regardless of the means by which it is produced. Exemplary methods of producing alkylated amino acids and alkylated peptides are known in the art and including alkylating an amino acid before inclusion in the peptide or peptide synthesis followed by chemical alkylation of the peptide. Without being held to any particular theory, it is believed that alkylation of peptides will achieve similar, if not the same, effects as acylation of the peptides, e.g., a prolonged half-life in circulation, a delayed onset of action, an extended duration of action, an improved resistance to proteases, such as DPP-IV, and increased potency at the glucagon superfamily peptide receptor.

[0055] The term “C₁-Cₙ alkyl” wherein n can be from 1 through 18, as used herein, represents a branched or linear alkyl group having from one to the specified number of carbon atoms. For example, C₁-C₆ alkyl represents a branched or linear alkyl group having from 1 to 6 carbon atoms. Typical C₁-C₁₈ alkyl groups include, but are not limited to, methyl, ethyl, n-propyl, iso-propyl, butyl, iso-butyl, sec-butyl, tert-butyl, pentyl, hexyl and the like. Alkyl groups optionally can be substituted, for example, with hydroxy (OH), halo, aryl, carboxyl, thio, C₃-C₈ cycloalkyl, and amino.

[0056] The term “C₀-Cₙ alkyl” wherein n can be from 1-18, as used herein, represents a branched or linear alkyl group having up to 18 carbon atoms. For example, the term “(C₀-C₆ alkyl)OH” represents a hydroxyl parent moiety attached to an alkyl substituent having up to 6 carbon atoms (e.g. —OH, —CH₂OH, —C₂H₄OH, —C₃H₆OH, —C₄H₈OH, —C₅H₁₀OH, —C₆H₁₂OH).

[0057] The term “C₃-Cₙ cycloalkyl” wherein n can be from 1 through 10, as used herein, represents a cyclic alkyl group having from one to the specified number of carbon atoms. For example, C₃-C₈ cycloalkyl represents a cyclic alkyl group having from 3 to 8 carbon atoms. Typical C₃-C₁₀ cyclo alkyl groups include, but are not limited to, cyclopropyl, cyclobutyl, cyclopentyl, cyclohexyl and the like. Cycloalkyl groups optionally can be substituted, for example, with hydroxy (OH), halo, aryl, carboxyl, thio, and amino.

[0058] The term “C₂-Cₙ alkenyl” wherein n can be from 2 through 18, as used herein, represents an unsaturated branched or linear group having from 2 to the specified number of carbon atoms and at least one double bond. Examples of such groups include, but are not limited to, 1-propenyl, 2-propenyl (—CH₂—CH═CH₂), 1,3-butadienyl, (—CH═CHCH═CH₂), 1-butenyl (—CH═CHCH₂CH₃), hexenyl, pentenyl, and the like. Alkenyl groups optionally can be substituted, for example, with hydroxy (OH), halo, aryl, carboxyl, thio, C₃-C₈ cycloalkyl, and amino.

[0059] The term “C₂-Cₙ alkynyl” wherein n can be from 2 to 18, refers to an unsaturated branched or linear group having from 2 to n carbon atoms and at least one triple bond. Examples of such groups include, but are not limited to, 1-propynyl, 2-propynyl, 1-butynyl, 2-butynyl, 1-pentynyl, and the like. Alkynyl groups optionally can be substituted, for example, with hydroxy (OH), halo, aryl, carboxyl, thio, C₃-C₈ cycloalkyl, and amino.

[0060] As used herein the term “aryl” refers to a monocyclic or polycyclic (for example, bicyclic, tricyclic, or tetracyclic) aromatic groups. The size of the aryl ring or rings is indicated by designating the number of carbons present. For example, the term “(C₁-C₃ alkyl)(C₆-C₁₀ aryl)” refers to a 6 to 10 membered aryl that is attached to a parent moiety via a one to three membered alkyl chain. Unless otherwise indicated, an aryl group can be unsubstituted or substituted with one or more, and in particular one to five groups independently selected from, for example, halo, alkyl, alkenyl, OCF₃, NO₂, CN, NC, OH, alkoxy, amino, CO₂H, C₃-Cₛ cycloalkyl, C(O)Oalkyl, aryl, and heteroaryl. Exemplary aryl groups include, but are not limited to, phenyl, naphthyl, tetrahydronaphthyl, chlorophenyl, indanyl, indenyl, methylphenyl, methoxyphenyl, trifluoromethylphenyl, nitrophenyl, 2,4-methoxychlorophenyl, and the like.

[0061] As used herein, the term “heteroaryl” refers to a monocyclic or polycyclic ring system containing one or more aromatic rings and containing at least one nitrogen, oxygen, or sulfur atom in an aromatic ring. The size of the heteroaryl ring and the presence of substituents or linking groups are indicated by designating the number of carbons present. For example, the term “(C₁-C₆ alkyl)(C₅-C₆ heteroaryl)” refers to a 5 or 6 membered heteroaryl that is attached to a parent moiety via a one to 6 membered alkyl chain. Unless otherwise indicated, a heteroaryl group can be unsubstituted or substituted with one or more, and in particular one to five groups independently selected from, for example, halo, alkyl, alkenyl, OCF₃, NO₂, CN, NC, OH, alkoxy, amino, CO₂H, C₃-C₈ cycloalkyl, C(O)Oalkyl, aryl, and heteroaryl. Examples of heteroaryl groups include, but are not limited to, thienyl, furyl, pyridyl, oxazolyl, quinolyl, thiophenyl, isoquinolyl, indolyl, triazinyl, triazolyl, isothiazolyl, isoxazolyl, imidazolyl, benzothiazolyl, pyrazinyl, pyrimidinyl, thiazolyl, and thiadiazolyl.

[0062] As used herein, the term “heteroalkyl” refers to a linear or branched hydrocarbon containing the indicated number of carbon atoms and at least one heteroatom in the backbone of the structure. Suitable heteroatoms for purposes herein include but are not limited to N, S, and O. Heteroalkyl groups optionally can be substituted, for example, with hydroxy (OH), halo, aryl, carboxyl, and amino

[0063] As used herein, the term “heterocycloalkyl” refers to a cyclic hydrocarbon containing the indicated number of carbon atoms and at least one heteroatom in the backbone of the structure. Suitable heteroatoms for purposes herein include but are not limited to N, S, and O. Heterocycloalkyl groups optionally can be substituted, for example, with hydroxy (OH), halo, aryl, carboxyl, and amino

[0064] As used herein, the term “halogen” or “halo” refers to one or more members of the group consisting of fluorine, chlorine, bromine, and iodine.

[0065] As used herein, the term “glucagon related peptide” refers to those peptides which have biological activity (as agonists or antagonists) at any one or more of the glucagon, GLP-1, GLP-2, and GIP receptors and comprise an amino acid sequence that shares at least 40% sequence identity (e.g., 45%, 50%, 55%, 60%, 65%, 70%, 75%, 80%, 85%, 90%, 95%) with at least one of native glucagon, native oxyntomodulin, native exendin-4, native GLP-1, native GLP-2, or native GIP. Unless otherwise stated, any reference to an amino acid position in a glucagon related peptide (e.g. for linkage of a GPCR ligand, a conjugate moiety, a hydrophilic polymer, acylation or alkylation) refers to the corresponding position relative to the native glucagon amino acid sequence (SEQ ID NO: 1601).

[0066] As used herein, the term “selectivity” of a molecule for a first receptor relative to a second receptor refers to the following ratio: EC₅₀ of the molecule at the second receptor divided by the EC₅₀ of the molecule at the first receptor. For example, a molecule that has an EC₅₀ of 1 nM at a first receptor and an EC₅₀ of 100 nM at a second receptor has 100-fold selectivity for the first receptor relative to the second receptor.

[0067] The term “identity” as used herein relates to the similarity between two or more sequences. Identity is measured by dividing the number of identical residues by the total number of residues and multiplying the product by 100 to achieve a percentage. Thus, two copies of exactly the same sequence have 100% identity, whereas two sequences that have amino acid deletions, additions, or substitutions relative to one another have a lower degree of identity. Those skilled in the art will recognize that several computer programs, such as those that employ algorithms such as BLAST (Basic Local Alignment Search Tool, Altschul et al. (1993) J. Mol. Biol. 215:403-410) are available for determining sequence identity

[0068] As used herein, the term “glucagon superfamily peptide” refers to a group of peptides related in structure in their N-terminal and C-terminal regions (see, for example, Sherwood et al., Endocrine Reviews 21: 619-670 (2000)). Members of this group include all glucagon related peptides, as well as Growth Hormone Releasing Hormone (GHRH; SEQ ID NO: 1619), vasoactive intestinal peptide (VIP; SEQ ID NO: 1620), pituitary adenylate cyclase-activating polypeptide 27 (PACAP-27; SEQ ID NO: 1621), peptide histidine isoleucine (PHI; SEQ ID NO: 1642), peptide histidine methionine (PHM; SEQ ID NO: 1622), Secretin (SEQ ID NO: 1623), and analogs, derivatives or conjugates with up to 1, 2, 3, 4, 5, 6, 7, 8, 9 or 10 amino acid modifications relative to the native peptide. Such peptides preferably retain the ability to interact (agonist or antagonist) with receptors of the glucagon receptor superfamily. Unless otherwise stated, any reference to an amino acid position in a glucagon superfamily peptide (e.g. for linkage of a GPCR ligand, a conjugate moiety, a hydrophilic polymer, acylation or alkylation) refers to the corresponding position relative to the native glucagon amino acid sequence (SEQ ID NO: 1601), see FIG. 1 for an alignment of representative glucagon superfamily peptides.

[0069] The term “glucagon agonist peptide” refers to a compound that binds to and activates downstream signaling of the glucagon receptor. However, this term should not be construed as limiting the compound to having activity at only the glucagon receptor. Rather, the glucagon agonist peptides of the present disclosures may exhibit additional activities at other receptors, as further discussed herein. Glucagon agonist peptides, for example, may exhibit activity (e.g., agonist activity) at the GLP-1 receptor and/or the GIP receptor. Also, the term “glucagon agonist peptide” should not be construed as limiting the compound to only peptides. Rather, compounds other than peptides are encompassed by this term. Accordingly, the glucagon agonist peptide in some aspects is a peptide in conjugate form (a heterodimer, a multimer, a fusion peptide), a chemically-derivatized peptide, a pharmaceutical salt of a peptide, a peptidomimetic, and the like.

[0070] The term “GLP-1 agonist peptide” refers to a compound that binds to and activates downstream signaling of the GLP-1 receptor. However, this term should not be construed as limiting the compound to having activity at only the GLP-1 receptor. Rather, the GLP-1 agonist peptides of the present disclosures may exhibit additional activities at other receptors, as further discussed herein. GLP-1 agonist peptides, for example, may exhibit activity (e.g., agonist activity) at the glucagon receptor and/or the GIP receptor. Also, the term “GLP-1 agonist peptide” should not be construed as limiting the compound to only peptides. Rather, compounds other than peptides are encompassed by this term. Accordingly, the GLP-1 agonist peptide in some aspects is a peptide in conjugate form (a heterodimer, a multimer, a fusion peptide), a chemically-derivatized peptide, a pharmaceutical salt of a peptide, a peptidomimetic, and the like.

[0071] The term “GIP agonist peptide” refers to a compound that binds to and activates downstream signaling of the GIP receptor. However, this term should not be construed as limiting the compound to having activity at only the GIP receptor. Rather, the GIP agonist peptides of the present disclosures may exhibit additional activities at other receptors, as further discussed herein. GIP agonist peptides, for example, may exhibit activity (e.g., agonist activity) at the GLP-1 receptor. Also, the term “GIP agonist peptide” should not be construed as limiting the compound to only peptides. Rather, compounds other than peptides are encompassed by this term. Accordingly, the GIP agonist peptide in some aspects is a peptide in conjugate form (a heterodimer, a multimer, a fusion peptide), a chemically-derivatized peptide, a pharmaceutical salt of a peptide, a peptidomimetic, and the like.

[0072] The term “glucagon antagonist peptide” refers to a compound that counteracts glucagon activity or prevents glucagon function. For example, a glucagon antagonist exhibits at least 60% inhibition (e.g., at least 70%, 80%, 90% or more inhibition) of the maximum response achieved by glucagon at the glucagon receptor. In a specific embodiment, the glucagon antagonist at a concentration of about 1 μM exhibits less than about 20% of the maximum agonist activity achieved by glucagon at the glucagon receptor (e.g. less than about 10% or 5%). This term should not be construed as limiting the compound to having activity at only the glucagon receptor. Rather, the glucagon antagonist peptides of the present disclosures may exhibit additional activities at the glucagon receptor (e.g., partial agonism) or other receptor. Glucagon antagonist peptides, for example, may exhibit activity (e.g., agonist activity) at the GLP-1 receptor. Also, the term “glucagon antagonist peptide” should not be construed as limiting the compound to only peptides. Rather, compounds other than peptides are encompassed by these terms. Accordingly, in some aspects, the glucagon agonist peptide is a peptide in conjugate form, a chemically-derivatized peptide, a pharmaceutical salt of a peptide, a peptidomimetic, and the like.

[0073] The term “GLP-1 antagonist peptide” refers to a compound that counteracts GLP-1 activity or prevents GLP-1 function. For example, a GLP-1 antagonist exhibits at least 60% inhibition (e.g., at least 70%, 80%, 90% or more inhibition) of the maximum response achieved by GLP-1 at the GLP-1 receptor. In a specific embodiment, a GLP-1 antagonist at a concentration of about 1 μM exhibits less than about 20% of the maximum agonist activity achieved by GLP-1 at the GLP-1 receptor (e.g. less than about 10% or 5%). The term should not be construed as limiting the compound to having activity at only the GLP-1 receptor. Rather, the GLP-1 antagonist peptides of the present disclosures may exhibit additional activities at the GLP-1 receptor (e.g., partial agonism) or other receptor. GLP-1 antagonist peptides, for example, may exhibit activity (e.g., agonist activity) at the glucagon receptor. Also, the term “GLP-1 antagonist peptide” should not be construed as limiting the compound to only peptides. Rather, compounds other than peptides are encompassed by these terms. Accordingly, in some aspects, the GLP-1 agonist peptide is a peptide in conjugate form, a chemically-derivatized peptide, a pharmaceutical salt of a peptide, a peptidomimetic, and the like.

[0074] The term “GIP antagonist peptide” refers to a compound that counteracts GIP activity or prevents GIP-1 function. For example, a GIP antagonist exhibits at least 60% inhibition (e.g., at least 70%, 80%, 90% or more inhibition) of the maximum response achieved by GIP at the GIP receptor. In a specific embodiment, a GIP antagonist at a concentration of about 1 μM exhibits less than about 20% of the maximum agonist activity achieved by GIP at the GIP receptor (e.g. less than about 10% or 5%). The term should not be construed as limiting the compound to having activity at only the GIP receptor. Rather, the GIP antagonist peptides of the present disclosures may exhibit additional activities at the GIP receptor (e.g., partial agonism) or other receptor. GIP antagonist peptides, for example, may exhibit activity (e.g., agonist activity) at the glucagon receptor. Also, the term “GIP antagonist peptide” should not be construed as limiting the compound to only peptides. Rather, compounds other than peptides are encompassed by these terms. Accordingly, in some aspects, the GIP agonist peptide is a peptide in conjugate form, a chemically-derivatized peptide, a pharmaceutical salt of a peptide, a peptidomimetic, and the like.

[0075] As used herein, the terms “glucagon analog” and “glucagon peptide” can be used interchangeably to refer to an analog of glucagon that has the indicated activity at a glucagon related peptide receptor.

[0076] As used herein the term “native glucagon” refers to a peptide consisting of the sequence of SEQ ID NO: 1601.

[0077] As used herein, the term “native GLP-1” is a generic term that designates GLP-1(7-36) amide (SEQ ID NO: 1603), GLP-1(7-37) acid (SEQ ID NO: 1604) or a mixture of those two compounds.

[0078] As used herein, the term “native GIP” refers to a peptide consisting of SEQ ID NO: 1607.

[0079] As used herein, “glucagon potency” or “potency compared to native glucagon” of a molecule refers to the ratio of the EC₅₀ of the molecule at the glucagon receptor divided by the EC₅₀ of native glucagon at glucagon receptor.

[0080] As used herein, “GLP-1 potency” or “potency compared to native GLP-1” of a molecule refers to the ratio of the EC₅₀ of the molecule at GLP-1 receptor divided by the EC₅₀ of native GLP-1 at GLP-1 receptor.

[0081] As used herein, “GIP potency” or “potency compared to native GIP” of a molecule refers to the ratio of the EC₅₀ of the molecule at the GIP receptor divided by the EC₅₀ of native GIP at the GIP receptor.

[0082] As used herein, “GPCR ligand” refers to a hydrophobic or lipophilic moiety that has biological activity (either agonist or antagonist) at a G protein-coupled receptor (GPCR). The GPCR ligand is wholly or partly non-peptidic. In some embodiments, the GPCR ligand is an agonist that binds to and activates the GPCR. In other embodiments, the GPCR ligand is an antagonist. In some embodiments, the GPCR ligand is an antagonist that acts by wholly or partially blocking binding of native ligand to the active site. In other embodiments, the GPCR ligand is an antagonist that acts by binding to the active site or an allosteric site and preventing activation of, or de-activating, the GPCR.

[0083] As used herein, “steroids and derivatives thereof” refers to compounds, either naturally occurring or synthesized, having a structure of Formula A:

[chemical structure]

wherein R¹ and R², when present, are independently moieties that permit or promote agonist or antagonist activity upon binding of the compound of Formula A to a GPCR; R³ and R⁴ are independently moieties that permit or promote agonist or antagonist activity upon binding of the compound of Formula A to a GPCR; and each dashed line represents an optional double bond. Formula A may further comprise one or more substituents at one or more of positions 1, 2, 3, 4, 5, 6, 7, 8, 9, 11, 12, 14, 15, 16, and 17 Contemplated optional substituents include, but are not limited to, OH, NH₂, ketone, and C₁-C₁₈ alkyl groups. Specific, nonlimiting examples of steroids and derivatives thereof include cholesterol, cholic acid estradiol, testosterone, and hydrocortisone.

[0084] As used herein, “fatty acids and derivatives thereof” refers to carboxylic acids comprising a unbranched C₁ to C₂₈ alkyl or C₂ to C₂₈ alkenyl moiety and can optionally comprise one or more halo substituents and/or optionally comprise one or more substituents other than halo. In some embodiments, the unbranched alkyl or alkenyl moiety can be wholly halo substituted (e.g., all hydrogens replaced with halo atoms). A short chain fatty acid comprises 1-5 carbon atoms. A medium chain fatty acid comprises 6-12 carbon. A long chain fatty acid comprises 13-22 carbon atoms. A very long chain fatty acid comprises 23-28 carbon atoms. Specific, nonlimiting examples of fatty acids include formic acid, acetic acid, n-caproic acid, heptanoic acid, caprylic acid, nonanoic acid, capric acid, undecanoic acid, lauric acid, tridecanoic acid, myristic acid, pentadeconoic acid, palmitic acid, heptadecanoic acid, stearic acid, nonadecanoic acid, arachidic acid, heneicosanoic acid, behenic acid, tricosanoic acid, mead acid, myristoleic acid, palmitoleic acid, sapienic acid, oleic acid, linoleic acid, α-linolenic acid, elaidic acid, petroselinic acid, arachidonic acid, dihydroxyeicosatetraenoic acid (DiHETE), octadecynoic acid, eicosatriynoic acid, eicosadienoic acid, eicosatrienoic acid, eicosapentaenoic acid, erucic acid, dihomolinolenic acid, docosatrienoic acid, docosapentaenoic acid, docosahexaenoic acid, and adrenic acid.

[0085] As used herein, “free fatty amides and derivatives thereof” refers to structures of Formula C:

[chemical structure]

wherein n is 0-26 and each R⁵, when present, is independently a moiety that permits or promotes agonist or antagonist activity upon binding of the compound of Formula C to a GPCR. For example, each R⁵, when present, can independently be hydrogen, C₁-C₇ alkyl, or halogen; and R⁶ can be hydrogen, C₁-C₁₈ alkyl, (C₁-C₁₈ alkyl)OH, (C₁-C₁₈ alkyl)NH₂, (C₀-C₈ alkyl)halo, C₂-C₁₈ alkenyl, C₂-C₁₈ alkynyl, heteroalkyl, (C₀-C₈ alkyl)aryl, or (C₀-C₈ alkyl)heteroaryl. Nonlimiting examples of free fatty amides include oleamide, stearoylethanolamide, palmitoylethanolamide, linolenoyl ethanolamide, linoleoyl ethanolamide, anandamide, oleoylehtanolamide, and N-oleoyldopamine.

[0086] As used herein, “phospholipids and derivatives thereof” refers to saturated or unsaturated compounds of Formula D:

[chemical structure]

wherein n is 0-26, each R⁵, when present, R⁷, and R⁸ are moieties that permit or promote agonist or antagonist activity upon binding of the compound of Formula D to a GPCR. For example, each R⁵, when present, can independently be hydrogen, C₁-C₇ alkyl or halogen; R⁷ can be choline, ethanolamine, or inositol; and R⁸ can be hydrogen or

[chemical structure]

Nonlimiting examples of phospholipids and derivatives thereof include platelet activating factor, lyso-platelet activating factor, oleo lysophosphatidylcholine, stearoyl lysophosphatidylcholine, palmitoyl lysophosphatidylcholine, lysophosphatidylethanolamine, and lysophosphatidylinositol.

[0087] As used herein, “grifolic acid and derivatives thereof” refers to compounds of Formula E:

[chemical structure]

wherein each R⁹ is independently a functional group that permits or promotes agonist or antagonist activity upon binding of the compound of Formula E to a GPCR. For example, each R⁹ can independently be hydrogen, OH, or O(C₁-C₈ alkyl).

[0088] As used herein, “diacetylphloroglucinol and derivatives thereof” refers to compounds of Formula F:

[chemical structure]

[0089] wherein each m is independently 0-15, and each R¹⁰ is independently a functional group that permits or promotes agonist or antagonist activity upon binding of the compound of Formula F to a GPCR. For example, each R¹⁰ can independently be hydrogen or C₁-C₁₈ alkyl.

[0090] As used herein, “retinoic acid and derivatives thereof” refers to compounds of Formula G:

[chemical structure]

wherein R¹¹ is a functional group that permits or promotes agonist or antagonist activity upon the binding of the compound of Formula G to a GPCR, and [symbol] represents either E or Z stereochemistry. For example, R¹¹ can be C(O)OH, CH₂OH, or C(O)H. Nonlimiting examples of retinoic acid and derivatives thereof include all-trans-retinoic acid, retinol, retinal, and 11-cis-retinoic acid.

[0091] As used herein, “thiazolidinedione derivative” refers to molecules comprising a functional group represented by Formula H:

[chemical structure]

Nonlimiting examples of thiazolidinedione derivatives include rosiglitazone, pioglitazone, and troglitazone.

[0092] As used herein, “linking group” is a molecule or group of molecules that binds two separate entities to one another. Linking groups may provide for optimal spacing of the two entities or may further supply a labile linkage that allows the two entities to be separated from each other. Labile linkages include hydrolyzable groups, photocleavable groups, acid-labile moieties, base-labile moieties and enzyme cleavable groups.

[0093] As used herein, the term “prodrug” is defined as any compound that undergoes chemical modification before exhibiting its full pharmacological effects.

[0094] As used herein, a “dipeptide” is the result of the linkage of an α-amino acid or α-hydroxyl acid to another amino acid, through a peptide bond.

[0095] As used herein the term “chemical cleavage” absent any further designation encompasses a non-enzymatic reaction that results in the breakage of a covalent chemical bond.

### EMBODIMENTS

[0096] The present disclosures provide glucagon superfamily peptides conjugated with GPCR ligands. In some aspects, the GPCR ligands are capable of acting at G protein-coupled receptors involved in metabolism or glucose homeostasis, and the conjugate provides superior biological effects on metabolism or glucose homeostasis compared to the peptide alone or the GPCR ligand alone. Without being bound by a theory of the invention, the GPCR ligand may serve to target the glucagon superfamily peptide to particular types of cells or tissues; or alternatively the glucagon superfamily peptide may serve to target the GPCR ligand or enhance its transport into the cell, e.g. through binding of peptide to a receptor that internalizes the conjugate.

[0097] The glucagon superfamily peptide conjugates of the invention can be represented by the following formula:

Q-L-Y

wherein Q is a glucagon superfamily peptide, Y is a GPCR ligand, and L is a linking group or a bond.

[0098] The glucagon superfamily peptide (Q) in some embodiments can be a glucagon related peptide that exhibits agonist activity at the glucagon receptor, agonist activity at the GLP-1 receptor, agonist activity at the GIP receptor, co-agonist activity at the glucagon and GLP-1 receptors, co-agonist activity at the glucagon and GIP receptors, co-agonist activity at the GLP-1 and GIP receptors, or tri-agonist activity at the glucagon, GIP, and GLP-1 receptors. In some embodiments, the glucagon related peptide exhibits antagonist activity at the glucagon, GLP-1 or GIP receptor.

[0099] The glucagon superfamily peptide (Q) in some embodiments may be a glucagon-related peptide, Growth Hormone Releasing Hormone (GHRH; SEQ ID NO: 1619), vasoactive intestinal peptide (VIP; SEQ ID NO: 1620), Pituitary adenylate cyclase-activating polypeptide 27 (PACAP-27; SEQ ID NO: 1621), peptide histidine methionine (PHM; SEQ ID NO: 1622), or Secretin (SEQ ID NO: 1623), and/or and analogs, derivatives and conjugates thereof. Glucagon superfamily peptides may have common structural characteristics, including but not limited to homology within the N-terminal amino acids and/or alpha-helical structure within the C-terminal portion. It is believed that the C-terminus generally functions in receptor binding and the N-terminus generally functions in receptor signaling. A few amino acids in the N-terminal portion and C-terminal portion are highly conserved among members of the glucagon superfamily, for example, His1, Gly4, Phe6, Phe22, Val23, Trp25, and Leu26, with amino acids at these positions showing identity, conservative substitutions or similarity in amino acid side chains. In some embodiments the glucagon related peptide Q is glucagon (SEQ ID NO: 1601), oxyntomodulin (SEQ ID NO: 1606), exendin-4 (SEQ ID NO: 1618), Glucagon-like peptide-1 (GLP-1) (amino acids 7-37 provided as SEQ ID NOs: 1603 and 1604), Glucagon-like peptide-2 (GLP-2) (SEQ ID NO: 1608), GIP (SEQ ID NO: 1607) or analogs, derivatives and conjugates of the foregoing. In some embodiments Q as a glucagon related peptide comprises an amino acid sequence that is at least about 40%, 45%, 50%, 55%, 60%, 65%, 70%, 75%, 80%, 85%, 90%, or 95% identical to the corresponding sequence of native glucagon, native oxyntomodulin, native exendin-4, native (7-37)GLP-1, native GLP-2, or native GIP over the length of the native peptide (or over the positions which correspond to glucagon, see e.g., FIG. 1). In other embodiments, a glucagon superfamily peptide (Q) comprises an amino acid sequence of native glucagon, native exendin-4, native (7-37)GLP-1, native GLP-2, native GHRH, native VIP, native PACAP-27, native PHM, native Oxyntomodulin, native Secretin, or native GIP with up to 1, 2, 3, 4, 5, 6, 7, 8, 9 or 10 amino acid modifications. In still further embodiments, Q comprises an amino acid sequence which is a chimera of two or more native glucagon related peptide sequences. In some embodiments, Q comprises an amino acid sequence at least about 50% identical to native glucagon (SEQ ID NO: 1601) that retains the alpha-helix conformation of the amino acids corresponding to amino acids 12-29.

[0100] In related aspects, the invention provides peptide conjugates represented by the formula

Q-L-Y

wherein Q is osteocalcin, calcitonin, amylin, or an analog, derivative or conjugate thereof, rather than a glucagon superfamily peptide; Y is a GPCR ligand; and L is a linking group or a bond. In some embodiments, Q comprises osteocalcin (SEQ ID NO: 1644), or an amino acid sequence that is at least about 40%, 45%, 50%, 55%, 60%, 65%, 70%, 75%, 80%, 85%, 90%, or 95% identical to native osteocalcin over the length of the native peptide. Q may comprise an analog of osteocalcin with up to 1, 2, 3, 4, 5, 6, 7, 8, 9 or 10 amino acid modifications relative to native osteocalcin, or a truncated analog of osteocalcin (e.g., amino acids 70-84) with up to 1, 2, 3, 4, 5, 6, 7, 8, 9 or 10 amino acid modifications relative to the native truncated osteocalcin. In some embodiments, Q comprises calcitonin (SEQ ID NO: 1645), or an amino acid sequence that is at least about 40%, 45%, 50%, 55%, 60%, 65%, 70%, 75%, 80%, 85%, 90%, or 95% identical to native calcitonin over the length of the native peptide. Q may comprise an analog of calcitonin with up to 1, 2, 3, 4, 5, 6, 7, 8, 9 or 10 amino acid modifications relative to native calcitonin. In some embodiments, Q comprises amylin (SEQ ID NO: 1646), or an amino acid sequence that is at least about 40%, 45%, 50%, 55%, 60%, 65%, 70%, 75%, 80%, 85%, 90%, or 95% identical to native amylin over the length of the native peptide. Q may comprise an analog of amylin with up to 1, 2, 3, 4, 5, 6, 7, 8, 9 or 10 amino acid modifications relative to native amylin.

### The GPCR Ligand (Y)

[0101] In the present disclosures relating to Q-L-Y conjugates, Y is a ligand that acts at any G protein-coupled receptor (GPCR), including any one the “G protein-coupled receptor superfamily” (GPCR superfamily), or a class or subgroup thereof. The GPCR superfamily is composed of receptors typically sharing a common structural motif of seven transmembrane helical domains. GPCRs play a crucial role in receiving chemical signals from other cells and, in response, activating certain cellular responses such as, for example, cellular metabolism, cell growth and motility, inflammation, neuronal signaling, and blood coagulation.

[0102] GPCR ligands bind to the portion of the GPCR that is on the outside of a cell. Ligand binding to the GPCR causes a conformational change in the GPCR, allowing the GPCR to act as a guanine nucleotide exchange factor. The ligand-bound GPCR activates an associated G protein by exchanging its bound GDP for a GTP. As a result, the G protein's alpha-subunit, together with the bound GTP, dissociate from the beta and gamma subunits of the GPCR to initiate intracellular signaling proteins or to target functional proteins. G protein-coupled receptors are important as targets for molecules such as hormones, neurotransmitters and physiologically active substances, which control, regulate or adjust the functions of living bodies. For example, GPCRs include receptors for biogenic amines, e.g., dopamine, epinephrine, histamine, glutamate (metabotropic effect), acetylcholine (muscarinic effect), and serotonin; for lipid mediators of inflammation such as prostaglandins, platelet activating factor, and leukotrienes; for peptide hormones such as calcitonin, C5a anaphylatoxin, follicle stimulating hormone, gonadotropin releasing hormone, neurokinin, oxytocin, and for proteases such as thrombin, trypsin, and factor VIIa/Xa; and for sensory signal mediators, e.g., retinal photopigments and olfactory stimulatory molecules.

[0103] G protein-coupled receptors can be divided generally into six classes based on sequence homology and functional similarity: Class A (Rhodopsin-like), Class B (Secretin receptor family), Class C (Metabotropic glutamate/pheromone), Class D (Fungal mating pheromone receptors), Class E (Cyclic AMP receptors), and Class F (Frizzled/Smoothened).

[0104] Class A (Rhodopsin-like) GPCRs, for example, represent a protein family that includes hormone, neurotransmitter and light receptors, all of which transduce extracellular signals through interaction with guanine nucleotide-binding (G) proteins. Members of Class A receptors include: Melatonin receptor, Interleukin-8 receptor, Orexin receptor, Angiotensin II receptor, Chemokine receptor, Galanin receptor, Bradykinin receptor, Endothelin receptor, Histamine H2 receptor, Somatostatin receptor, Neuropeptide Y receptor, Urotensin II receptor, GPR orphan receptor, Olfactory receptor, Mas transmembrane protein, Formyl/methionyl peptide receptor, Histamine H1 receptor, Dopamine receptor, Muscarinic acetylcholine receptor, C-X-C chemokine receptor type 5, 5-Hydroxytryptamine 7 receptor, G10D orphan receptor, Prolactin-releasing peptide receptor, RDC1 orphan receptor, Opioid receptor, 5-Hydroxytryptamine 4 receptor, Bombesin receptor, Adenosine receptor, Gonadotrophin releasing hormone receptor, Melanocortin/ACTH receptor, Neurokinin receptor, Opsin, Retinal pigment epithelium GPCR, Vasopressin receptor, Octopamine receptor, Glycoprotein hormone receptor, P2Y5 purinoceptor, Cannabinoid receptor, 5-Hydroxytryptamine receptor, 5-Hydroxytryptamine 6 receptor, Adrenergic receptor, Anaphylatoxin chemotactic receptor, DEZ orphan receptor, GPR1 orphan receptor, GPR4 orphan receptor, Platelet-activating factor receptor, P2 purinoceptor, Peropsin, APJ receptor, Growth hormone secretagogue receptor type 1, GPR37 orphan receptor, Protease-activated receptor, Histamine H3 receptor, Leukotriene B4 receptor, Neurotensin receptor, Sphingosine 1-phosphate receptor, Lysophosphatidic acid receptor, Cysteinyl leukotriene receptor, CX3C Fractalkine chemokine receptor, G2A lysophosphatidylcholine receptor, OGR1 sphingosylphosphorylcholine receptor, Neuromedin U receptor, XCR1 Lymphotactin chemokine receptor, Neuropeptide FF receptor, Psychosine receptor, Histamine H4 receptor, KISS-1 peptide receptor, Relaxin receptor, Melanin-concentrating hormone receptor, Prostanoid receptor, Cholecystokinin receptor, Trace amine receptor, Thyrotropin-releasing hormone receptor, Neuropeptide W receptor, GPR40-related receptor, and G-protein-coupled receptor 30.

[0105] GPR30 is a member of the rhodopsin-like family of G protein-coupled receptors and has been demonstrated to be a functional estrogen receptor. Female GPR30^{(-/-)} mice exhibit hyperglycemia and impaired glucose tolerance, reduced body growth, increased blood pressure, and reduced serum IGF-I levels, demonstrating the importance of this receptor to normal metabolic function. GPR30 is capable of binding 17β-estradiol (E2) in vitro with high affinity resulting in increases in cAMP production and intracellular [Ca²⁺]. Thus, without wishing to be bound by any theory, it is believed that conjugates of the disclosure exhibiting GPR30 agonist activity are useful for treating hyperglycemic conditions, such as diabetes mellitus.

[0106] GPR40 is also a member of the rhodopsin-like family of GPCRs. It is highly expressed in pancreatic β-cells and is activated by medium- and long-chain saturated and unsaturated free fatty acids. In Chinese hamster ovary (CHO) cells, exogenously expressed GPR40 increased intracellular [Ca²⁺] and activated extracellular signal-related kinase 1/2. In rat pancreatic β-cells, linolenic acid reduced voltage-gated K⁺ current through GPR40-mediated cAMP levels and protein kinase A activity, leading to enhanced β-cell excitability and insulin secretion. Thus, without wishing to be bound by any theory, it is believed that conjugates of the disclosure exhibiting GPR40 agonist activity are useful for treating hyperglycemic conditions, such as diabetes mellitus.

[0107] In humans GPR119, also a member of the rhodopsin-like family, is highly expressed in pancreatic islet β-cells and fetal liver. Phospholipids and fatty acid amides have been described as possible endogenous ligands for GPR119. Transfection of cells with GPR119 show an increase in constitutive intracellular cAMP levels. When treated with platelet-activating factor and lyso-platelet activating factor, CHO cells expressing GPR119 exhibit increased cAMP levels. Without wishing to be bound by any theory, it is believed that conjugates of the disclosure exhibiting GPR119 agonist activity are useful for treating hyperglycemic conditions, such as diabetes mellitus.

[0108] GPR120, also member of the rhodopsin-like family, is highly expressed in the human intestinal tract and has been shown to be activated by medium- to long-chain free fatty acids, including α-linoleic acid. Stimulation of GPR120 has been demonstrated to increase insulin levels and proliferation of β-cells. Mouse enteroendocrine STC-1 cells secrete GLP-1 and cholecystokinin upon challenge with free fatty acids and this response can be inhibited by transfection with an RNAi expression vector specific for GPR120, indicating a role in metabolic homestasis. Without wishing to be bound by any theory, it is believed that conjugates of the disclosure exhibiting GPR120 agonist activity are useful for treating hyperglycemic conditions, such as diabetes mellitus.

### Activity of the GPCR Ligand

[0109] In some embodiments, Y exhibits an EC₅₀ for GPCR activation (or in the case of an antagonist, an IC₅₀) of about 10 mM or less, or 1 mM (1000 μM) or less (e.g., about 750 μM or less, about 500 μM or less, about 250 μM or less, about 100 μM or less, about 75 μM or less, about 50 μM or less, about 25 μM or less, about 10 μM or less, about 7.5 μM or less, about 6 μM or less, about 5 μM or less, about 4 μM or less, about 3 μM or less, about 2 μM or less or about 1 μM or less). In some embodiments, Y exhibits an EC₅₀ or IC₅₀ at a GPCR of about 1000 nM or less (e.g., about 750 nM or less, about 500 nM or less, about 250 nM or less, about 100 nM or less, about 75 nM or less, about 50 nM or less, about 25 nM or less, about 10 nM or less, about 7.5 nM or less, about 6 nM or less, about 5 nM or less, about 4 nM or less, about 3 nM or less, about 2 nM or less or about 1 nM or less). In some embodiments, Y has an EC₅₀ or IC₅₀ at a GPCR which is in the picomolar range. Accordingly, in some embodiments, Y exhibits an EC₅₀ or IC₅₀ at a GPCR of about 1000 μM or less (e.g., about 750 μM or less, about 500 μM or less, about 250 μM or less, about 100 μM or less, about 75 μM or less, about 50 μM or less, about 25 μM or less, about 10 μM or less, about 7.5 μM or less, about 6 μM or less, about 5 μM or less, about 4 μM or less, about 3 μM or less, about 2 μM or less).

[0110] In some embodiments, Y exhibits an EC₅₀ or IC₅₀ at a GPCR that is about 0.1 μM or more, about 0.5 μM or more, or about 1 μM or more. G protein-coupled receptor activation (GPCR activity) can be measured in vitro by any method known in the art, including measurement of intracellular Ca²⁺ concentration as described by Hara et al., Naunyn-Schmied Arch Pharmacol 380(3):247-55 (2009) or measurement of intracellular cAMP concentration as described by Overton et al., Cell Metabolism, 3, 165-175 (2006).

[0111] Briefly, to measure intracellular [Ca²⁺]ᵢ, cells expressing the GPCR of interest are seeded at a density of 2×10⁵ cells/well on collagen-coated 96-well plates, incubated at 37° C. for 21 hours, and then incubated in Hanks' balanced salt solution (HBSS, pH 7.4) containing Calcium Assay Kit Component A (Molecular Devices, Sunnyvale, Calif.) for one hour at room temperature. Mobilization of [Ca²⁺]ᵢ evoked by agonists is monitored using a fluorometric imaging plate reader.

[0112] To measure cAMP production, HEK293 cell monolayers expressing the GPCR of interest under the control of a tetracycline-inducible promoter are pretreated overnight with 10-20 ng/mL tetracycline to induce expression of the GPCR. Treated monolayers are then incubated for 30 minutes at 37° C. with a particular agonist in stimulation buffer plus 1% DMSO. Cells are then lysed and cyclic AMP content is determined by any method known in the art, e.g., with the Perkin Elmer AlphaScreen cAMP kit.

[0113] In some embodiments, including any of the preceeding embodiments, Y exhibits about 0.001% or more, about 0.01% or more, about 0.1% or more, about 0.5% or more, about 1% or more, about 5% or more, about 10% or more, about 20% or more, about 30% or more, about 40% or more, about 50% or more, about 60% or more, about 75% or more, about 100% or more, about 125% or more, about 150% or more, about 175% or more, about 200% or more, about 250% or more, about 300% or more, about 350% or more, about 400% or more, or about 450% or higher activity at the GPCR relative to the native ligand (GPCR potency). In some embodiments, Y exhibits about 100% or less or about 500% or less activity at the GPCR relative to native ligand. The activity of Y at a receptor relative to a native ligand of the receptor is calculated as the inverse ratio of EC₅₀s for Y versus the native ligand. In some embodiments, Y is the native ligand of the receptor.

[0114] In some embodiments, Y exhibits an EC₅₀ or IC₅₀ at a GPCR that is about that is about 0.1 μM or more, about 0.5 μM or more, or about 1 μM or more, and about 100% or less or about 500% or less activity at the GPCR relative to native ligand. In some embodiments, Y exhibits an EC₅₀ or IC₅₀ at a GPCR that is about that is about 0.1 μM or more and about 500% or less activity at the GPCR relative to native ligand.

### Structure of the GPCR Ligand (Y)

[0115] The GPCR ligand of the invention (Y) is partly or wholly non-peptidic and is hydrophobic or lipophilic. In some embodiments, the GPCR ligand has a molecular weight that is about 5000 daltons or less, or about 4000 daltons or less, or about 3000 daltons or less, or about 2000 daltons or less, or about 1750 daltons or less, or about 1500 daltons or less, or about 1250 daltons or less, or about 1000 daltons or less, or about 750 daltons or less, or about 500 daltons or less, or about 250 daltons or less. The structure of Y can be in accordance with any of the teachings disclosed herein.

[0116] Y can exhibit any structure that enables it to act at any G protein-coupled receptor (GPCR), including any one of the “G protein-coupled receptor superfamily” (GPCR superfamily), or a class or subgroup thereof. In some embodiments, Y acts at a Class A GPCR. In these embodiments, Y can be, for example, an adrenergic receptor agonist, such as a β3 adrenergic receptor agonist, which acts to increase thermogenesis and resembles the effect of glucagon, or a nicotinic acetylcholine receptor agonist, such as an α7-nicotinic acetylcholine receptor agonist, which plays a role in decreasing obesity-induced inflammation and improved metabolic syndrome (see Wang et al., “Activation of the Cholinergic Antiinflammatory Pathway Ameliorates Obesity-Induced Inflammation and Insulin Resistance” Endocrinology 152(3):836-845 (2011).

[0117] β3 adrenergic receptor agonists include amibegron (ethyl([(7S)-7-([(2R)-2-(3-chlorophenyl)-2-hydroxyethyl]amino)-5,6,7,8-tetrahydronaphthalen-2-yl]oxy)acetate), solabegron (3′-[(2-{[(2R)-2-(3-chlorophenyl)-2-hydroxyethyl]amino}ethyl)amino]biphenyl-3-carboxylic acid), CL316,243 [Fu et al., (2008) “The effects of beta(3)-adrenoceptor agonist CL-316,243 on adiponectin, adiponectin receptors and tumor necrosis factor-alpha expressions in adipose tissues of obese diabetic KKAy mice.” European journal of pharmacology 584 (1): 202-6], L-796,568 [Larsen et al., (2002) “Effect of a 28-d treatment with L-796568, a novel β3-adrenergic receptor agonist, on energy expenditure and body composition in obese men”. The American Journal of Clinical Nutrition 76 (4): 780-8], and LY-368,842, Ro40-2148, (S)-6-(4-(2-((3-(9H-carbazol-4-yloxy)-2-hydroxypropyl)amino)-2-methylpropyl)phenoxy)-3-pyridinecarboxamide monohydrochloride, (S)-4-{2-[2-hydroxy-3-(4-hydroxyphenoxy)propylamino]ethyl}phenoxymethylcyclohexylphosphinic acid lithium salt, 4-{1-[2-(S)-hydroxy-3-(4-hydroxyphenoxy)-propylamino]cyclopentylmethyl)phenyl-phosphonic acid lithium salt, (RR)-5-{2-[2-(3,4-dihydroxyphenyl)-2-hydroxyethylamino]propyl}-1,3-benzodioxole-2,2-dicarboxylate [Arch, (2002) “β₃-adrenoceptor agonists: potential, pitfalls and progress”. Eur J Pharm 440:99-107], and analogs of any of the foregoing that retain the β3 adrenergic receptor agonist activity, including pharmaceutically acceptable salts of such compounds. All references are and β3 adrenergic receptor agonists disclosed therein are incorporated by reference in their entirety.

[0118] α7-nicotinic acetylcholine receptor agonists include (+)-N-(1-azabicyclo[2.2.2]oct-3-yl)benzo[b]furan-2-carboxamide, A-582941, AR-R17779 ((2S)-2′H-spiro[4-azabicyclo[2.2.2]octane-2,5′-[1,3]oxazolidin]-2′-one), TC-1698, TC-5619 (N-[(2S,3S)-2-(pyridin-3-ylmethyl)-1-azabicyclo[2.2.2]oct-3-yl]-1-benzofuran-2-carboxamide), GTS-21 (3-[(3E)-3-[(2,4-dimethoxyphenyl)methylidene]-5,6-dihydro-4H-pyridin-2-yl]pyridine), PHA-543,613 (N-[(3R)-1-azabicyclo[2.2.2]oct-3-yl]furo[2,3-c]pyridine-5-carboxamide), PNU-282,987 (N-[(3R)-1-azabicyclo[2.2.2]oct-3-yl]-4-chlorobenzamide), PHA-709829, SSR-180,711 ((4-bromophenyl) 1,4-diazabicyclo[3.2.2]nonane-4-carboxylate), tropisetron, WAY-317,538 (5-morpholin-4-yl-pentanoic acid (4-pyridin-3-yl-phenyl)-amide), anabaseine, choline and nicotine, and analogs of any of the foregoing that retain the α7-nicotinic acetylcholine receptor agonist activity, including pharmaceutically acceptable salts of such compounds.

[0119] In the embodiments described herein, Y is conjugated to L (e.g. when L is a linking group) or Q (e.g. when L is a bond) at any position of Y that is capable of reacting with Q or L. One skilled in the art could readily determine the position and means of conjugation in view of general knowledge and the disclosure provided herein.

[0120] In any of the embodiments described herein wherein Y comprises a tetracyclic skeleton having three 6-membered rings joined to one 5-membered ring or a variation thereof (e.g. a Y that acts at the vitamin D receptor), the carbon atoms of the skeleton are referred to by position number, as shown below:

[chemical structure]

For example, a modification having a ketone at position-6 refers to the following structure:

[chemical structure]

[0121] In some embodiments of the invention, Y acts at any GPCR. In these embodiments, Y can have any structure that permits or promotes agonist activity upon binding to a GPCR, while in other embodiments Y is an antagonist of a GPCR.

### Steroid or Derivative Thereof

[0122] In some embodiments of the invention, Y is a steroid or derivative thereof. In exemplary embodiments, Y comprises a structure as shown in Formula A:

[chemical structure]

wherein R¹ and R², when present, are independently moieties that permit or promote agonist or antagonist activity upon binding of the compound of Formula A to a GPCR; R³ and R⁴ are independently moieties that permit or promote agonist or antagonist activity upon binding of the compound of Formula A to a GPCR; and each dashed line represents an optional double bond. Formula A may further comprise one or more substituents at one or more of positions 1, 2, 3, 4, 5, 6, 7, 8, 9, 11, 12, 14, 15, 16, and 17. Contemplated optional substituents include, but are not limited to, OH, NH₂, ketone, and C₁-C₁₈ alkyl groups.

[0123] In some embodiments, Y comprises a structure of Formula A wherein

[0124] R¹ is present and is hydrogen, C₁-C₁₈ alkyl, C₂-C₁₈ alkenyl, C₂-C₁₈ alkynyl, heteroalkyl, (C₀-C₈ alkyl)aryl, (C₀-C₈ alkyl)heteroaryl, (C₀-C₈ alkyl)C(O)C₁-C₁₈ alkyl, (C₀-C₈ alkyl)C(O)C₂-C₁₈ alkenyl, (C₀-C₈ alkyl)C(O)C₂-C₁₈ alkynyl, (C₀-C₈ alkyl)C(O)H, (C₀-C₈ alkyl)C(O)aryl, (C₀-C₈ alkyl)C(O)heteroaryl, (C₀-C₈ alkyl)C(O)OC₁-C₁₈ alkyl, (C₀-C₈ alkyl)C(O)OC₂-C₁₈ alkenyl, (C₀-C₈ alkyl)C(O)OC₂-C₁₈ alkynyl, (C₀-C₈ alkyl)C(O)OH, (C₀-C₈ alkyl)C(O)O aryl, (C₀-C₈ alkyl)C(O)O heteroaryl, (C₀-C₈ alkyl)C(O)NR²⁴C₁-C₁₈ alkyl, (C₀-C₈ alkyl)C(O)NR²⁴C₂-C₁₈ alkenyl, (C₀-C₈ alkyl)C(O)NR²⁴C₂-C₁₈ alkynyl, (C₀-C₈ alkyl)C(O)NR²⁴H₂, (C₀-C₈ alkyl)C(O)NR²⁴aryl, (C₀-C₈ alkyl)C(O)NR²⁴heteroaryl, or SO₃H;

[0125] R² is present and is hydrogen, (C₀-C₈ alkyl)halo, C₁-C₁₈ alkyl, C₂-C₁₈ alkenyl, C₂-C₁₈ alkynyl, heteroalkyl, (C₀-C₈ alkyl)aryl, (C₀-C₈ alkyl)heteroaryl, (C₀-C₈ alkyl)OC₁-C₁₈ alkyl, (C₀-C₈ alkyl)OC₂-C₁₈ alkenyl, (C₀-C₈ alkyl)OC₂-C₁₈ alkynyl, (C₀-C₈ alkyl)OH, (C₀-C₈ alkyl)SH, (C₀-C₈alkyl)NR²⁴C₁-C₁₈ alkyl, (C₀-C₈ alkyl)NR²⁴C₂-C₁₈ alkenyl, (C₀-C₈ alkyl)NR²⁴C₂-C₁₈ alkynyl, (C₀-C₈ alkyl)NR²⁴H₂, (C₀-C₈ alkyl)C(O)C₁-C₁₈ alkyl, (C₀-C₈ alkyl)C(O)C₂-C₁₈ alkenyl, (C₀-C₈ alkyl)C(O)C₂-C₁₈ alkynyl, (C₀-C₈ alkyl)C(O)H, (C₀-C₈ alkyl)C(O)aryl, (C₀-C₈ alkyl)C(O)heteroaryl, (C₀-C₈ alkyl)C(O)OC₁-C₁₈ alkyl, (C₀-C₈ alkyl)C(O)OC₂-C₁₈ alkenyl, (C₀-C_{8 alkyl)C(O)OC}₂-C₁₈ alkynyl, (C₀-C₈ alkyl)C(O)OH, (C₀-C₈ alkyl)C(O)O aryl, (C₀-C₈ alkyl)C(O)O heteroaryl, (C₀-C₈ alkyl)OC(O)C₁-C₁₈ alkyl, (C₀-C₈ alkyl)OC(O)C₂-C₁₈ alkenyl, (C₀-C₈ alkyl)OC(O)C₂-C₁₈ alkynyl, (C₀-C₈ alkyl)C(O)NR²⁴C₁-C₁₈ alkyl, (C₀-C₈ alkyl)C(O)NR²⁴C₂-C₁₈ alkenyl, (C₀-C₈ alkyl)C(O)NR²⁴C₂-C₁₈ alkynyl, (C₀-C₈ alkyl)C(O)NR²⁴H₂, (C₀-C₈ alkyl)C(O)NR²⁴aryl, (C₀-C₈ alkyl)C(O)NR²⁴heteroaryl, (C₀-C₈ alkyl)NR²⁴C(O)C₁-C₁₈ alkyl, (C₀-C₈alkyl)NR²⁴C(O)C₂-C₈ alkenyl, or (C₀-C₈ alkyl)NR²⁴C(O)C₂-C₁₈ alkynyl, (C₀-C₈ alkyl)NR²⁴C(O)OH, (C₀-C₈ alkyl)OC(O)OC₁-C₁₈ alkyl, (C₀-C₈ alkyl)OC(O)OC₂-C₁₈ alkenyl, (C₀-C₈ alkyl)OC(O)OC₂-C₁₈ alkynyl, (C₀-C₈ alkyl)OC(O)OH, (C₀-C₈ alkyl)OC(O)NR²⁴C₁-C₁₈ alkyl, (C₀-C₈ alkyl)OC(O)NR²⁴C₂-C₁₈ alkenyl, (C₀-C₈ alkyl)OC(O)NR²⁴C₂-C₁₈ alkynyl, (C₀-C₈ alkyl)OC(O)NR²⁴H₂, (C₀-C₈ alkyl)NR²⁴(O)OC₁-C₁₈ alkyl, (C₀-C₈ alkyl)NR²⁴(O)OC₂-C₁₈ alkenyl, (C₀-C₈ alkyl)NR²⁴(O)OC₂-C₁₈ alkynyl, or (C₀-C₈ alkyl)NR²⁴(O)OH;

[0126] R³ is hydrogen, (C₀-C₈ alkyl)halo, C₁-C₁₈ alkyl, C₂-C₁₈ alkenyl, C₂-C₁₈ alkynyl, heteroalkyl, (C₀-C₈ alkyl)aryl, (C₀-C₈ alkyl)heteroaryl, (C₀-C₈ alkyl)OC₁-C₁₈ alkyl, (C₀-C₈ alkyl)OC₂-C₁₈ alkenyl, (C₀-C₈ alkyl)OC₂-C₁₈ alkynyl, (C₀-C₈ alkyl)OH, (C₀-C₈ alkyl)SH, (C₀-C₈ alkyl)NR²⁴C₁-C₁₈ alkyl, (C₀-C₈ alkyl)NR²⁴C₂-C₁₈ alkenyl, (C₀-C₈ alkyl)NR²⁴C₂-C₁₈ alkynyl, (C₀-C₈alkyl)NR²⁴H₂, (C₀-C₈ alkyl)C(O)C₁-C₁₈ alkyl, (C₀-C₈ alkyl)C(O)C₂-C₁₈ alkenyl, (C₀-C₈ alkyl)C(O)C₂-C₁₈ alkynyl, (C₀-C₈ alkyl)C(O)H, (C₀-C₈ alkyl)C(O)aryl, (C₀-C₈ alkyl)C(O)heteroaryl, (C₀-C₈ alkyl)C(O)OC₁-C₁₈ alkyl, (C₀-C₈ alkyl)C(O)OC₂-C₁₈ alkenyl, (C₀-C₈ alkyl)C(O)OC₂-C₁₈ alkynyl, (C₀-C₈ alkyl)C(O)OH, (C₀-C₈ alkyl)C(O)O aryl, (C₀-C₈ alkyl)C(O)O heteroaryl, (C₀-C₈ alkyl)OC(O)C₁-C₁₈ alkyl, (C₀-C₈ alkyl)OC(O)C₂-C₁₈ alkenyl, (C₀-C₈ alkyl)OC(O)C₂-C₁₈ alkynyl, (C₀-C₈ alkyl)C(O)NR²⁴C₁-C₁₈ alkyl, (C₀-C₈ alkyl)C(O)NR²⁴C₂-C₁₈ alkenyl, (C₀-C₈ alkyl)C(O)NR²⁴C₂-C₁₈ alkynyl, (C₀-C₈ alkyl)C(O)NR²⁴H₂, (C₀-C₈ alkyl)C(O)NR²⁴aryl, (C₀-C₈ alkyl)C(O)NR²⁴heteroaryl, (C₀-C₈ alkyl)NR²⁴C(O)C₁-C₁₈ alkyl, (C₀-C₈alkyl)NR²⁴C(O)C₂-C₈ alkenyl, or (C₀-C₈ alkyl)NR²⁴C(O)C₂-C₁₈ alkynyl, (C₀-C₈ alkyl)NR²⁴C(O)OH, (C₀-C₈ alkyl)OC(O)OC₁-C₁₈ alkyl, (C₀-C₈ alkyl)OC(O)OC₂-C₁₈ alkenyl, (C₀-C₈ alkyl)OC(O)OC₂-C₁₈ alkynyl, (C₀-C₈ alkyl)OC(O)OH, (C₀-C₈ alkyl)OC(O)NR²⁴C₁-C₁₈ alkyl, (C₀-C₈ alkyl)OC(O)NR²⁴C₂-C₁₈ alkenyl, (C₀-C₈ alkyl)OC(O)NR²⁴C₂-C₁₈ alkynyl, (C₀-C₈ alkyl)OC(O)NR²⁴H₂, (C₀-C₈ alkyl)NR²⁴(O)OC₁-C₁₈ alkyl, (C₀-C₈ alkyl)NR²⁴(O)OC₂-C₁₈ alkenyl, (C₀-C₈ alkyl)NR²⁴(O)OC₂-C₁₈ alkynyl, or (C₀-C₈ alkyl)NR²⁴(O)OH;

[0127] R⁴ is hydrogen, (C₀-C₈ alkyl)halo, C₁-C₁₈ alkyl, C₂-C₁₈ alkenyl, C₂-C₁₈ alkynyl, heteroalkyl, (C₀-C₈ alkyl)aryl, (C₀-C₈ alkyl)heteroaryl, (C₀-C₈ alkyl)OC₁-C₁₈ alkyl, (C₀-C₈ alkyl)OC₂-C₁₈ alkenyl, (C₀-C₈ alkyl)OC₂-C₁₈ alkynyl, (C₀-C₈ alkyl)OH, (C₀-C₈ alkyl)SH, (C₀-C₈ alkyl)NR²⁴C₁-C₁₈ alkyl, (C₀-C₈ alkyl)NR²⁴C₂-C₁₈ alkenyl, (C₀-C₈ alkyl)NR²⁴C₂-C₁₈ alkynyl, (C₀-C₈alkyl)NR²⁴H₂, (C₀-C₈ alkyl)C(O)C₁-C₁₈ alkyl, (C₀-C₈ alkyl)C(O)C₂-C₁₈ alkenyl, (C₀-C₈ alkyl)C(O)C₂-C₁₈ alkynyl, (C₀-C₈ alkyl)C(O)H, (C₀-C₈ alkyl)C(O)aryl, (C₀-C₈ alkyl)C(O)heteroaryl, (C₀-C₈ alkyl)C(O)OC₁-C₁₈ alkyl, (C₀-C₈ alkyl)C(O)OC₂-C₁₈ alkenyl, (C₀-C₈ alkyl)C(O)OC₂-C₁₈ alkynyl, (C₀-C₈ alkyl)C(O)OH, (C₀-C₈ alkyl)C(O)O aryl, (C₀-C₈ alkyl)C(O)O heteroaryl, (C₀-C₈ alkyl)OC(O)C₁-C₁₈ alkyl, (C₀-C₈ alkyl)OC(O)C₂-C₁₈ alkenyl, (C₀-C₈ alkyl)OC(O)C₂-C₁₈ alkynyl, (C₀-C₈ alkyl)C(O)NR²⁴C₁-C₁₈ alkyl, (C₀-C₈ alkyl)C(O)NR²⁴C₂-C₁₈ alkenyl, (C₀-C₈ alkyl)C(O)NR²⁴C₂-C₁₈ alkynyl, (C₀-C₈ alkyl)C(O)NR²⁴H₂, (C₀-C₈ alkyl)C(O)NR²⁴aryl, (C₀-C₈ alkyl)C(O)NR²⁴heteroaryl, (C₀-C₈ alkyl)NR²⁴C(O)C₁-C₁₈ alkyl, (C₀-C₈alkyl)NR²⁴C(O)C₂-C₈ alkenyl, or (C₀-C₈ alkyl)NR²⁴C(O)C₂-C₁₈ alkynyl, (C₀-C₈ alkyl)NR²⁴C(O)OH, (C₀-C₈ alkyl)OC(O)OC₁-C₁₈ alkyl, (C₀-C₈ alkyl)OC(O)OC₂-C₁₈ alkenyl, (C₀-C₈ alkyl)OC(O)OC₂-C₁₈ alkynyl, (C₀-C₈ alkyl)OC(O)OH, (C₀-C₈ alkyl)OC(O)NR²⁴C₁-C₁₈ alkyl, (C₀-C₈ alkyl)OC(O)NR²⁴C₂-C₁₈ alkenyl, (C₀-C₈ alkyl)OC(O)NR²⁴C₂-C₁₈ alkynyl, (C₀-C₈ alkyl)OC(O)NR²⁴H₂, (C₀-C₈ alkyl)NR²⁴(O)OC₁-C₁₈ alkyl, (C₀-C₈ alkyl)NR²⁴(O)OC₂-C₁₈ alkenyl, (C₀-C₈ alkyl)NR²⁴(O)OC₂-C₁₈ alkynyl, or (C₀-C₈ alkyl)NR²⁴(O)OH; and

[0128] R²⁴ is hydrogen or C₁-C₁₈ alkyl.

[0129] In some embodiments, Y comprises a structure of Formula A wherein

[0130] R¹ is present and is hydrogen, C₁-C₇ alkyl; (C₀-C₃ alkyl)C(O)C₁-C₇ alkyl, (C₀-C₃ alkyl)C(O)aryl, or SO₃H;

[0131] R² is present and is hydrogen, halo, OH, or C₁-C₇ alkyl;

[0132] R³ is hydrogen, halo, OH, or C₁-C₇ alkyl;

[0133] R⁴ is hydrogen, (C₀-C₈ alkyl)halo, C₁-C₈ alkyl, C₂-C₈ alkenyl, C₂₋₁₈ alkynyl, heteroalkyl, (C₀-C₈ alkyl)aryl, (C₀-C₈ alkyl)heteroaryl, (C₀-C₈ alkyl)OC₁-C₈ alkyl, (C₀-C₈ alkyl)OC₂-C₈ alkenyl, (C₀-C₈ alkyl)OC₂-C₈ alkynyl, (C₀-C₈ alkyl)OH, (C₀-C₈ alkyl)SH, (C₀-C₈ alkyl)NR²⁴C₁-C₈ alkyl, (C₀-C₈ alkyl)NR²⁴C₂-C₈ alkenyl, (C₀-C₈ alkyl)NR²⁴C₂-C₈ alkynyl, (C₀-C₈ alkyl)NR²⁴H₂, (C₀-C₈ alkyl)C(O)C₁-C₈ alkyl, (C₀-C₈ alkyl)C(O)C₂-C₈ alkenyl, (C₀-C₈ alkyl)C(O)C₂-C₈ alkynyl, (C₀-C₈ alkyl)C(O)H, (C₀-C₈ alkyl)C(O)aryl, (C₀-C₈ alkyl)C(O)heteroaryl, (C₀-C₈ alkyl)C(O)OC₁-C₈ alkyl, (C₀-C₈ alkyl)C(O)OC₂-C₈ alkenyl, (C₀-C₈ alkyl)C(O)OC₂-C₈ alkynyl, (C₀-C₈ alkyl)C(O)OH, (C₀-C₈ alkyl)C(O)O aryl, (C₀-C₈ alkyl)C(O)O heteroaryl, (C₀-C₈ alkyl)OC(O)C₁-C₈ alkyl, (C₀-C₈ alkyl)OC(O)C₂-C₈ alkenyl, (C₀-C₈ alkyl)OC(O)C₂-C₁₈ alkynyl, (C₀-C_{8 alkyl)C(O)NR}²⁴C₁-C₈ alkyl, (C₀-C₈ alkyl)C(O)NR²⁴C₂-C₈ alkenyl, (C₀-C₈ alkyl)C(O)NR²⁴C₂-C₈ alkynyl, (C₀-C₈ alkyl)C(O)NR²⁴H₂, (C₀-C₈ alkyl)C(O)NR²⁴aryl, (C₀-C₈ alkyl)C(O)NR²⁴heteroaryl, (C₀-C₈ alkyl)NR²⁴C(O)C₁-C₈ alkyl, (C₀-C₈ alkyl)NR²⁴C(O)C₂-C₈ alkenyl, or (C₀-C₈ alkyl)NR²⁴C(O)C₂-C₈ alkynyl, (C₀-C₈ alkyl)NR²⁴C(O)OH, (C₀-C₈ alkyl)OC(O)OC₁-C₈ alkyl, (C₀-C₈ alkyl)OC(O)OC₂-C₈ alkenyl, (C₀-C₈ alkyl)OC(O)OC₂-C₈ alkynyl, (C₀-C₈ alkyl)OC(O)OH, (C₀-C₈ alkyl)OC(O)NR²⁴C₁-C₈ alkyl, (C₀-C₈ alkyl)OC(O)NR²⁴C₂-C₈ alkenyl, (C₀-C₈ alkyl)OC(O)NR²⁴C₂-C₈ alkynyl, (C₀-C₈ alkyl)OC(O)NR²⁴H₂, (C₀-C₈ alkyl)NR²⁴(O)OC₁₈ alkyl, (C₀-C₈ alkyl)NR²⁴(O)OC₂-C₈ alkenyl, (C₀-C₈ alkyl)NR²⁴(O)OC₂-C₈ alkynyl, or (C₀-C₈ alkyl)NR²⁴(O)OH; and,

[0134] R²⁴ is hydrogen or C₁-C₇ alkyl.

[0135] In some embodiments, R¹ is hydrogen, propionate, acetate, benzoate, or sulfate; R² is hydrogen or methyl; R³ is hydrogen or methyl; and R⁴ is acetate, cypionate, hemisucciniate, enanthate, or propionate.

[0136] In embodiments wherein Y comprises a structure of Formula A, Y is conjugated to L (e.g. when L is a linking group) or Q (e.g. when L is a bond) at any position of Formula A that is capable of reacting with Q or L. One skilled in the art could readily determine the position of conjugation on Formula A and means of conjugation of Formula A to Q or L in view of general knowledge and the disclosure provided herein. In some embodiments, Formula A is conjugated to L or Q at any of positions 1, 2, 3, 4, 5, 6, 7, 8, 9, 10, 11, 12, 13, 14, 15, 16, 17, 18, 19, or 20 of Formula A. In some embodiments, Formula A is conjugated to L or Q at position 1, 3, 6, 7, 12, 10, 13, 16, 17, or 19 of Formula A.

### Free Fatty Acid or Derivative Thereof

[0137] In some embodiments of the invention, Y is a free fatty acid or derivative thereof, as shown in Formula B:

[chemical structure]

wherein n is 0-26 and each R⁵, when present, are each independently a moiety that permits or promotes agonist or antagonist activity upon binding of the compound of Formula B to a GPCR. In some embodiments, Y comprises a structure of Formula B, wherein n is 0-26 and each R⁵ is independently hydrogen, C₁-C₇ alkyl, or halogen. In some embodiments Formula B is saturated such as, for example, formic acid, acetic acid, n-caproic acid, heptanoic acid, caprylic acid, nonanoic acid, capric acid, undecanoic acid, lauric acid, tridecanoic acid, myristic acid, pentadeconoic acid, palmitic acid, heptadecanoic acid, stearic acid, nonadecanoic acid, arachidic acid, heneicosanoic acid, behenic acid, tricosanoic acid, and derivatives thereof. In some embodiments Formula B is unsaturated with either cis or trans stereochemistry such as, for example, mead acid, myristoleic acid, palmitoleic acid, sapienic acid, oleic acid, linoleic acid, α-linolenic acid, elaidic acid, petroselinic acid, arachidonic acid, dihydroxyeicosatetraenoic acid (DiHETE), octadecynoic acid, eicosatriynoic acid, eicosadienoic acid, eicosatrienoic acid, eicosapentaenoic acid, erucic acid, dihomolinolenic acid, docosatrienoic acid, docosapentaenoic acid, docosahexaenoic acid, adrenic acid, and derivatives thereof.

[0138] In some embodiments Formula B is a saturated or unsaturated short chain fatty acid, wherein n is 0-3. In some embodiments, Formula B is a saturated or unsaturated medium chain fatty acid, wherein n is 4-10. In some embodiments, Formula B is a saturated or unsaturated long chain fatty acid, wherein n is 11-20. In some embodiments, Formula B is a saturated or unsaturated very long chain fatty acid, wherein n is 21-26.

[0139] In some embodiments, the tail of Formula B is further modified to comprise a moiety such as a carboxylic acid, a carboxylic acid derivative, or amide. For example, a modified compound of Formula B can include MEDICA16, as shown below:

[chemical structure]

[0140] In embodiments wherein Y comprises a structure of Formula B, Y is conjugated to L (e.g. when L is a linking group) or Q (e.g. when L is a bond) at any position of Formula B that is capable of reacting with Q or L. One skilled in the art could readily determine the position of conjugation on Formula B and means of conjugation of Formula B to Q or L in view of general knowledge and the disclosure provided herein. In some embodiments, Formula B is conjugated to L or Q at any position on Formula B. In some embodiments, Formula B is conjugated to L or Q through a terminal carboxylic acid moiety.

### Free Fatty Amide or Derivative Thereof

[0141] In some embodiments of the invention, Y is a free fatty amide or derivative thereof, as shown in Formula C:

[chemical structure]

wherein n is 0-26 and each R⁵, when present, is independently a moiety that permits or promotes agonist or antagonist activity upon binding of the compound of Formula C to a GPCR. In some embodiments, Y comprises a structure of Formula C, wherein n is 0-26; each R⁵, when present, is independently hydrogen, or C₁-C₇ alkyl, halogen; and R⁶ is hydrogen, C₁-C₁₈ alkyl, (C₁-C₁₈ alkyl)OH, (C₁-C₁₈ alkyl)NH₂, (C₀-C₈ alkyl)halo, C₂-C₁₈ alkenyl, C₂-C₁₈ alkynyl, heteroalkyl, (C₀-C₈ alkyl)aryl, or (C₀-C₈ alkyl)heteroaryl. In some embodiments Formula C is saturated, while in other embodiments, Formula C is unsaturated with either cis or trans stereochemistry.

[0142] In some embodiments, Y comprises a structure of Formula C, wherein n is 4-26; each R⁵, when present, is hydrogen; and R⁶ is hydrogen. For example, Y can include oleamide, as shown below:

[chemical structure]

[0143] In some embodiments, Y comprises a structure of Formula C, wherein n is 4-26; each R⁵, when present, is independently hydrogen or halogen; and R⁶ is (C₁-C₈ alkyl)OH. Nonlimiting examples of compounds of Formula C when R⁶ is (C₁-C₈ alkyl)OH include:

[chemical structure]

and derivatives thereof.

[0144] In some embodiments, Y comprises a structure of Formula C, wherein n is 4-26; each R⁵, when present, is independently hydrogen or halogen; and R⁶ is (C₁-C₃ alkyl)aryl. For example, Y can include N-oleoyldopamine, as shown below:

[chemical structure]

[0145] In embodiments wherein Y comprises a structure of Formula C, Y is conjugated to L (e.g. when L is a linking group) or Q (e.g. when L is a bond) at any position of Formula C that is capable of reacting with Q or L. One skilled in the art could readily determine the position of conjugation on Formula C and means of conjugation of Formula C to Q or L in view of general knowledge and the disclosure provided herein. In some embodiments, Formula C is conjugated to L or Q at any position on Formula C. In some embodiments, Formula C is conjugated to L or Q through a terminal carboxylic acid or through a hydroxyl moiety.

### Phospholipid or Derivative Thereof

[0146] In some embodiments of the invention, Y is a phospholipid or derivative thereof, as shown in Formula D:

[chemical structure]

wherein n is 0-26, each R⁵, R⁷, and R⁸ are moieties that permit or promote agonist or antagonist activity upon binding of the compound of Formula D to a GPCR. In some embodiments, Y comprises a structure of Formula D, wherein n is 0-26; each R⁵, when present, is independently hydrogen, C₁-C₇ alkyl, or halogen; R⁷ is choline, ethanolamine, or inositol; and R⁸ is hydrogen or

[chemical structure]

In some embodiments Formula D is saturated, while in other embodiments, Formula D is unsaturated with either cis or trans stereochemistry.

[0147] In some embodiments, Y comprises a structure of Formula D, wherein each n is independently 4-26; each R⁵, when present, is independently hydrogen or halogen; R⁷ is choline; and R⁸ is

[chemical structure]

as shown below:

[chemical structure]

For example, Y can include 1-palmitoyl-2-oleo-sn-glycero-3-phosphocholine, as shown below:

[chemical structure]

[0148] In some embodiments, Y comprises a structure of Formula D, wherein n is 4-26; each R⁵, when present, is independently hydrogen or halogen; R⁷ is choline; and R⁸ is acetyl, as shown below:

[chemical structure]

[0149] In some embodiments, Y comprises a structure of Formula D, wherein n is 4-26; each R⁵, when present, is independently hydrogen or halogen; R⁷ is choline; and R⁸ is OH, as shown below:

[chemical structure]

Nonlimiting examples of Y in these embodiments include:

[chemical structure]

and derivatives thereof.

[0150] In some embodiments, Y comprises a structure of Formula D, wherein n is 4-26; each R⁵, when present, is independently hydrogen or halogen; R⁷ is ethanolamine, and R⁸ is OH, as shown below:

[chemical structure]

Nonlimiting examples of Y in these embodiments include:

[chemical structure]

[0151] In some embodiments, Y comprises a structure of Formula D, wherein n is 4-26; each R⁵, when present, is independently hydrogen or halogen; R⁷ is inositol, and R⁸ is OH, as shown below:

[chemical structure]

Nonlimiting examples of Y in these embodiments include:

[chemical structure]

and derivatives thereof.

[0152] In embodiments wherein Y comprises a structure of Formula D, Y is conjugated to L (e.g. when L is a linking group) or Q (e.g. when L is a bond) at any position of Formula D that is capable of reacting with Q or L. One skilled in the art could readily determine the position of conjugation on Formula D and means of conjugation of Formula D to Q or L in view of general knowledge and the disclosure provided herein. In some embodiments, Formula D is conjugated to L or Q through a terminal carboxylic acid, amino, or hydroxyl moiety.

### Grifolic Acid or Derivative Thereof

[0153] In some embodiments of the invention, Y is grifolic acid or derivative thereof, as shown in Formula E:

[chemical structure]

wherein each R⁹ is independently a moiety that permits or promotes agonist or antagonist activity upon binding of the compound of Formula E to a GPCR. In some embodiments, Y comprises a structure of Formula E, wherein each R⁹ is independently hydrogen, OH, or O(C₁-C₈ alkyl). Nonlimiting examples of Y in these embodiments include grifolic acid and grifolic acid methyl ether, shown below:

[chemical structure]

and derivatives thereof.

[0154] In embodiments wherein Y comprises a structure of Formula E, Y is conjugated to L (e.g. when L is a linking group) or Q (e.g. when L is a bond) at any position of Formula E that is capable of reacting with Q or L. One skilled in the art could readily determine the position of conjugation on Formula E and means of conjugation of Formula E to Q or L in view of general knowledge and the disclosure provided herein. In some embodiments, Formula E is conjugated to L or Q at any position on Formula E. In some embodiments, Formula E is conjugated to L or Q through a carboxylic acid or hydroxyl moiety.

### Diacetylphloroglucinol or Derivative Thereof

[0155] In some embodiments of the invention, Y is diacetylphloroglucinol or derivative thereof, as shown in Formula F:

[chemical structure]

wherein each m is independently 0-15, and each R¹⁰ is independently a moiety that permits or promotes agonist or antagonist activity upon binding of the compound of Formula F to a GPCR. In some embodiments, Y comprises a structure of Formula F, wherein each m is independently 0-15; and each R¹⁰ is independently hydrogen or C₁-C₁₈ alkyl. In some embodiments, Y is a compound of Formula F, wherein each m is 9 and each R¹⁰ is hydrogen, as shown below:

[chemical structure]

[0156] In embodiments wherein Y comprises a structure of Formula F, Y is conjugated to L (e.g. when L is a linking group) or Q (e.g. when L is a bond) at any position of Formula F that is capable of reacting with Q or L. One skilled in the art could readily determine the position of conjugation on Formula F and means of conjugation of Formula F to Q or L in view of general knowledge and the disclosure provided herein. In some embodiments, Formula F is conjugated to L or Q at any position on Formula F. In some embodiments, Formula F is conjugated to L or Q through a hydroxyl moiety.

### Retinoic Acid or Derivative Thereof

[0157] In some embodiments, Y is retinoic acid or a derivative thereof, as shown in Formula G:

[chemical structure]

wherein R¹¹ is a moiety that permits or promotes agonist or antagonist activity upon the binding of the compound of Formula G to a GPCR, and [symbol] represents either E or Z stereochemistry. In some embodiments, Y comprises a structure of Formula G wherein R¹¹ is C(O)OH, CH₂OH, or C(O)H. In some embodiments, Y comprises a structure of Formula G wherein R¹¹ is a carboxylic acid derivative. Nonlimiting examples of the compound of Formula G include:

[chemical structure]

and derivatives thereof.

[0158] In embodiments wherein Y comprises a structure of Formula G, Y is conjugated to L (e.g. when L is a linking group) or Q (e.g. when L is a bond) at any position of Formula G that is capable of reacting with Q or L. One skilled in the art could readily determine the position of conjugation on Y and means of conjugation of Y to Q or L in view of general knowledge and the disclosure provided herein. In some embodiments, Y is conjugated to L or Q through any position of Y. In some embodiments, Formula G is conjugated to L or Q at R¹¹.

### Thiazolidinedione Derivative

[0159] In some exemplary embodiments, Y is a thiazolidinedione compound comprising a structure as described by Formula H:

[chemical structure]

Nonlimiting examples of the compound of Formula H include:

[chemical structure]

and derivatives thereof.

[0160] In embodiments wherein Y comprises a structure of Formula H, Y is conjugated to L (e.g. when L is a linking group) or Q (e.g. when L is a bond) at any position of Formula H that is capable of reacting with Q or L. One skilled in the art could readily determine the position of conjugation on Formula H and means of conjugation of Formula H to Q or L in view of general knowledge and the disclosure provided herein. In some embodiments, Formula H is conjugated to L or Q through a hydroxyl moiety, through an aromatic moiety, or through a carboxylic acid of Formula H.

### GPCR Ligands of Low Molecular Weight

[0161] In some embodiments of the invention, Y is small molecule having a molecular weight of up to about 5000 daltons, or up to about 2000 daltons, or up to about 1000 daltons, or up to about 500 daltons that permits or promotes agonist or antagonist activity at a GPCR. In some embodiments, Y is 1000 daltons or less. Nonlimiting examples of small molecules that permit or promote agonist or antagonist activity at a GPCR include:

[chemical structure]

[0162] In the embodiments wherein Y is a GPCR ligand of low molecular weight, Y is conjugated to L (e.g. when L is a linking group) or Q (e.g. when L is a bond) at any position of Y that is capable of reacting with Q or L. One skilled in the art could readily determine the position of conjugation on Y and means of conjugation of Y to Q or L in view of general knowledge and the disclosure provided herein. In some embodiments, Y is conjugated to L or Q through any position of Y, such as, for example, a carboxylic acid or an alcohol moiety.

### 4-Phenoxymethylpiperidines

[0163] In some embodiments of the invention, Y is a 4-phenoxymethylpiperidine or derivative thereof, as shown in Formula J:

[chemical structure]

wherein R¹⁴ and R¹⁵ are each moieties that permits or promotes agonist or antagonist activity at a GPCR. In some embodiments, Y comprises a structure of Formula J wherein

[0164] R¹⁴ is phenyl, pyridin-2-yl, pyridin-3-yl, pyridin-4-yl, pyrimidin-5-yl, pyrazol-4-yl, 1H-pyrazol-4-yl, 6-oxo-1,6-dihydropyridin-3-yl, 2-oxo-1,2-dihydropyrimidin-5-yl, 2-oxo-1,2-dihydropyridin-4-yl and 2-oxo-2,3-dihydrooxazolo[4,5-b]pyridin-6-yl;

[0165] wherein said phenyl, pyridin-2-yl, pyridin-3-yl, pyridin-4-yl, pyrimidin-5-yl, pyrazol-4-yl, 1H-pyrazol-4-yl, 6-oxo-1,6-dihydropyridin-3-yl, 2-oxo-1,2-dihydropyrimidin-5-yl, 2-oxo-1,2-dihydropyridin-4-yl or 2-oxo-2,3-dihydrooxazolo[4,5-b]pyridin-6-yl of R¹⁴ is optionally substituted with 1 to 3 radicals independently selected from halo, —X¹R¹⁶, —X¹OR¹⁶, —X¹C(O)R¹⁶, —X¹C(O)OR¹⁶, —X²NR¹⁶C(O)R¹⁶, —X¹S(O)₂R¹⁶, —X¹NR¹⁶S(O)₂R¹⁶, —X¹C(O)NR¹⁶R¹⁷, —X¹C(O)NR¹⁶X²OR¹⁷, —X¹C(O)NR¹⁶X²NR¹⁶R¹⁷, —X¹C(O)NR¹⁶X²C(O)OR¹⁷, —X¹S(O)O₂X²R¹⁶, —X¹S(O)₀₋₂X²OR¹⁶, —X²CN, —X¹OX²R¹⁶, —X¹NR¹⁷X²R¹⁶, —X²NR¹⁶R¹⁷, —X¹S(O)₀₋₂X²C(O)R¹⁶, —X¹S(O)₀₋₂X²C(O)OR¹⁶ and —X¹S(O)₀₋₂NR¹⁶R¹⁷;

[0166] wherein X¹ is selected from a bond, O, NR¹⁷ and C₁₄alkyl;

[0167] R¹⁷ is selected from hydrogen and C₁₋₆alkyl;

[0168] each X² is independently selected from a bond and C₁₋₄alkyl;

[0169] each R¹⁶ is independently selected from hydrogen, C₁₋₆ alkyl, C₆₋₁₀aryl, C₁₋₁₀heteroaryl, C₃₋₈heterocycloalkyl, C₃₋₈cycloalkyl and —X³C(O)OR¹⁸, —X³R¹⁸—X³OR¹⁸—X³NR¹⁸R¹⁹;

[0170] wherein said alkyl, aryl, heteroaryl, cycloalkyl and heterocycloalkyl of R¹⁶ is optionally substituted with 1 to 3 radicals independently selected from hydroxy, halo, amino, cyano, C₁₋₆alkyl, halo-substituted-C₁₋₆alkyl, hydroxy-substituted-C₁₋₆alkyl, C₁₋₆alkoxy, halo-substituted-C₁-6alkoxy, C₆₋₁₀aryl-C₁₋₄alkoxy and —NR¹⁸C(O)R¹⁹; X³ is C₁₋₃alkyl; and

[0171] R¹⁸ is selected from hydrogen, C₁₋₆alkyl and C₃₋₈heterocycloalkyl optionally substituted with C₁₋₆alkyl;

[0172] R¹⁹ are independently selected from hydrogen and C₁₋₆ alkyl;

[0173] and R¹⁵ is selected from R²⁰ and —C(O)OR²⁰;

[0174] wherein R²⁰ is selected from C₁₋₆alkyl, C₆₋₁₀aryl, C₁₋₁₀heteroaryl, C₃₋₈cycloalkyl and C₃₋₈heterocycloalkyl;

[0175] wherein said alkyl, aryl, heteroaryl, cycloalkyl or heterocycloalkyl of R²⁰ is optionally substituted with 1 to 3 radicals independently selected from halo, C₁₋₆alkyl, C₃₋₁₂cycloalkyl, C₃₋₈heterocycloalkyl, halo-substituted-C₁₋₆alkyl, hydroxy-substituted-C₁₋₆alkyl, and halo-substituted-C₁₋₆alkoxy; or the pharmaceutically acceptable salts thereof.

[0176] Nonlimiting examples of 4-phenoxymethylpiperidine compounds that permit or promote agonist or antagonist activity at a GPCR include: 2-(4-((2,6-difluoro-4-(5-(methylsulfonyl)pyridin-2-yl)phenoxy)methyl)piperidin-1-yl)-5-ethylpyrimidine; tert-butyl 4-((3,5-difluoro-4′-(methylsulfonyl)biphenyl-4-yloxy)methyl)piperidine-1-carboxylate; 2-(4-((3,5-difluoro-4′-(3-methyloxetan-3-yl)methylsulfonyl)biphenyl-4-yloxy)methyl)piperidin-1-yl)-5-ethylpyrimidine; 2-(4-((3,5-difluoro-4′-(isobutylsulfonyl)biphenyl-4-yloxy)methyl)piperidin-1-yl)-5-ethylpyrimidine; 2-(4-((3,5-difluoro-4′-(propylsulfonyl)biphenyl-4-yloxy)methyl)piperidin-1-yl)-5-ethylpyrimidine; 2-(4-((3,5-difluoro-4′-(methylsulfonyl)biphenyl-4-yloxy)methyl)piperidin-1-yl)-5-ethylpyrimidine; 2-(44(3,5-difluoro-4′-(isopropylsulfonyl)biphenyl-4-yloxy)methyl)piperidin-1-yl)-5-ethylpyrimidine; 4′-((1-(5-ethylpyrimidin-2-yl)piperidin-4-yl)methoxy)-3′,5′-difluorobiphenyl-4-carbonitrile; 4′-((1-(5-ethylpyrimidin-2-yl)piperidin-4-yl)methoxy)-3′,5′-difluorobiphenyl-3-carbonitrile; 2-(4′-((1-(5-ethylpyrimidin-2-yl)piperidin-4-yl)methoxy)-3′,5′-difluorobiphenyl-3-yl)acetonitrile; (4′-((1-(5-ethylpyrimidin-2-yl)piperidin-4-yl)methoxy)-3′,5′-difluorobiphenyl-3-yl)methanol; 2-(4-((3,5-difluoro-3′-(methylsulfonyl)biphenyl-4-yloxy)methyl)piperidin-1-yl)-5-ethylpyrimidine; 2-(4′-((1-(5-ethylpyrimidin-2-yl)piperidin-4-yl)methoxy)-3′,5′-difluorobiphenyl-4-yl)acetonitrile; (4′-((1-(5-ethylpyrimidin-2-yl)piperidin-4-yl)methoxy)-3′,5′-difluorobiphenyl-4-yl)methanol; 2-(4-((2,6-difluoro-4-(2-(pyrrolidin-1-yl)pyrimidin-5-yl)phenoxy)methyl)piperidin-1-yl)-5-ethylpyrimidine; 2-(4-((2,6-difluoro-4-(pyrimidin-5-yl)phenoxy)methyl)piperidin-1-yl)-5-ethylpyrimidine; 2-(4-((3,5-difluorobiphenyl-4-yloxy)methyl)piperidin-1-yl)-5-ethylpyrimidine; 2-(4-((2,6-difluoro-4-(pyridin-4-yl)phenoxy)methyl)piperidin-1-yl)-5-ethylpyrimidine; tert-butyl 4-((2,6-difluoro-4-(2-methoxypyridin-4-yl)phenoxy)methyl)piperidine-1-carboxylate; tert-butyl 4-((2,6-difluoro-4-(pyridin-4-yl)phenoxy)methyl)piperidine-1-carboxylate; 2-(4-((2,6-difluoro-4-(6-(methylsulfonyl)pyridin-3-yl)phenoxy)methyl)piperidin-1-yl)-5-ethylpyrimidine; 2-(4-((4-(6-chloro-2-methylpyridin-3-yl)-2,6-difluorophenoxy)methyl)piperidin-1-yl)-5-ethylpyrimidine; 2-(4-((2,6-difluoro-4-(1-methyl-1H-pyrazol-4-yl)phenoxy)methyl)piperidin-1-yl)-5-ethylpyrimidine; 2-(4-((2,6-difluoro-4-(1H-pyrazol-4-yl)phenoxy)methyl)piperidin-1-yl)-5-ethylpyrimidine; 5-(4-((1-(5-ethylpyrimidin-2-yl)piperidin-4-yl)methoxy)-3,5-difluorophenyl)picolinonitrile; 2-(4-((2,6-difluoro-4-(3-methoxypyridin-4-yl)phenoxy)methyl)piperidin-1-yl)-5-ethylpyrimidine; N-(4′-((1-(5-ethylpyrimidin-2-yl)piperidin-4-yl)methoxy)-3′,5′-difluorobiphenyl-4-yl)acetamide; N-(4′-((1-(5-ethylpyrimidin-2-yl)piperidin-4-yl)methoxy)-3′,5′-difluorobiphenyl-4-yl)methanesulfonamide; 2-(4-((4-(6-(benzyloxy)pyridin-3-yl)-2,6-difluorophenoxy)methyl)piperidin-1-yl)-5-ethylpyrimidine; 5-(4-((1-(5-ethylpyrimidin-2-yl)piperidin-4-yl)methoxy)-3,5-difluorophenyl)pyridin-2(1H)-one; 2-(4-((2,6-difluoro-4-(2-methoxypyrimidin-5-yl)phenoxy)methyl)piperidin-1-yl)-5-ethylpyrimidine; 5-(4-((1-(5-ethylpyrimidin-2-yl)piperidin-4-yl)methoxy)-3,5-difluorophenyl)pyrimidin-2(1H)-one; 5-(4-((1-(5-ethylpyrimidin-2-yl)piperidin-4-yl)methoxy)-3,5-difluorophenyl)pyrimidine-2-carboxamide; tert-butyl 4-((2,6-difluoro-4-(pyridin-3-yl)phenoxy)methyl)piperidine-1-carboxylate; 5-(4-((1-(5-ethylpyrimidin-2-yl)piperidin-4-yl)methoxy)-3,5-difluorophenyl)pyrimidine-2-carboxylic acid; 2 (5 (4 ((1 (5 ethylpyrimidin-2-yl)piperidin-4-yl)methoxy)-3,5-difluorophenyl)pyridin-2-yl)propan-2-ol; 2-(4-((3,5-difluoro-4′-(1H-tetrazol-5-yl)biphenyl-4-yloxy)methyl)piperidin-1-yl)-5-ethylpyrimidine; 2-(4-((3,5-difluoro-3′-(2H-tetrazol-5-yl)biphenyl-4-yloxy)methyl)piperidin-1-yl)-5-ethylpyrimidine; 2-(4-3′-((2H-tetrazol-5-yl)methyl)-3,5-difluorobiphenyl-4-yloxy)methyl)piperidin-1-yl)-5-ethylpyrimidine; 2-(4-(4′-((2H-tetrazol-5-yl)methyl)-3,5-difluorobiphenyl-4-yloxy)methyl)piperidin-1-yl)-5-ethylpyrimidine; 2-(4-((4-(6-(2H-tetrazol-5-yl)pyridin-3-yl)-2,6-difluorophenoxy)methyl)piperidin-1-yl)-5-ethylpyrimidine; 2-(4-((3,5-difluoro-4′-(2-methyl-2H-tetrazol-5-yl)biphenyl-4-yloxy)methyl)piperidin-1-yl)-5-ethylpyrimidine; 2-(4-((3,5-difluoro-4′-(1-methyl-1H-tetrazol-5-yl)biphenyl-4-yloxy)methyl)piperidin-1-yl)-5-ethylpyrimidine; 2-(4-(3,5-difluoro-3′-(2-methyl-2H-tetrazol-5-yl)biphenyl-4-yloxy)methyl)piperidin-1-yl)-5-ethylpyrimidine; 2-(4-((3,5-difluoro-3′-(1-methyl-1H-tetrazol-5-yl)biphenyl-4-yloxy)methyl)piperidin-1-yl)-5-ethylpyrimidine; 2-(4-((3,5-difluoro-3′-((2-methyl-2H-tetrazol-5-yl)methyl)biphenyl-4-yloxy)methyl)piperidin-1-yl)-5-ethylpyrimidine; 2-(4-((3,5-difluoro-3′-((1-methyl-1H-tetrazol-5-yl)methyl)biphenyl-4-yloxy)methyl)piperidin-1-yl)-5-ethylpyrimidine; 2-(4-((3,5-difluoro-4′-((2-methyl-2H-tetrazol-5-yl)methyl)biphenyl-4-yloxy)methyl)piperidin-1-yl)-5-ethylpyrimidine; 2-(4-((3,5-difluoro-4′-((1-methyl-1H-tetrazol-5-yl)methyl)biphenyl-4-yloxy)methyl)piperidin-1-yl)-5-ethylpyrimidine; 2-(4-((2,6-difluoro-4-(6-(2-methyl-2H-tetrazol-5-yl)pyridin-3-yl)phenoxy)methyl)piperidin-1-yl)-5-ethylpyrimidine; 2-(4-((2,6-difluoro-4-(6-(1-methyl-1H-tetrazol-5-yl)pyridin-3-yl)phenoxy)methyl)piperidin-1-yl)-5-ethylpyrimidine; 1-methylcyclopropyl 4-((3,5-difluoro-4′-(methylsulfonyl)biphenyl-4-yloxy)methyl)piperidine-1-carboxylate; 4-(4-((1-(tert-butoxycarbonyl)piperidin-4-yl)methoxy)-3,5-difluorophenyl)pyridine 1-oxide; tert-butyl 4-((2,6-difluoro-4-(2-oxo-1,2-dihydropyridin-4-yl)phenoxy)methyl)piperidine-1-carboxylate; tert-butyl 4-((2,6-difluoro-4-(1-methyl-2-oxo-1,2-dihydropyridin-4-yl)phenoxy)methyl)piperidine-1-carboxylate; 2-(4-((2,6-difluoro-4-(2-methyl-6-(1H-1,2,4-triazol-1-yl)pyridin-3-yl)phenoxy)methyl)piperidin-1-yl)-5-ethylpyrimidine; 2-(4-((2,6-difluoro-4-(2-methyl-6-(methylsulfonyl)pyridin-3-yl)phenoxy)methyl)piperidin-1-yl)-5-ethylpyrimidine; 5-(4′-((1-(5-ethylpyrimidin-2-yl)piperidin-4-yl)methoxy)-3′,5′-difluorobiphenyl-4-yl)oxazole; 2-(4-((3,5-difluoro-4′-(1H-pyrazol-3-yl)biphenyl-4-yloxy)methyl)piperidin-1-yl)-5-ethylpyrimidine; 1-(4′-((1-(5-ethylpyrimidin-2-yl)piperidin-4-yl)methoxy)-3′,5′-difluorobiphenyl-4-yl)-N-methylmethanamine; N-((4′-((1-(5-ethylpyrimidin-2-yl)piperidin-4-yl)methoxy)-3′,5′-difluorobiphenyl-4-yl)methyl)-2-methylpropan-2-amine; 44(4′-((1-(5-ethylpyrimidin-2-yl)piperidin-4-yl)methoxy)-3′,5′-difluorobiphenyl-4-yl)methyl)morpholino; 2-(4-((4′-((1H-imidazol-1-yl)methyl)-3,5-difluorobiphenyl-4-yloxy)methyl)piperidin-1-yl)-5-ethylpyrimidine; 2-(4-((4′-((2H-tetrazol-2-yl)methyl)-3,5-difluorobiphenyl-4-yloxy)methyl)piperidin-1-yl)-5-ethylpyrimidine; 2-(4-((4′-((1H-tetrazol-1-yl)methyl)-3,5-difluorobiphenyl-4-yloxy)methyl)piperidin-1-yl)-5-ethylpyrimidine; 5-(4-((1-(5-ethylpyrimidin-2-yl)piperidin-4-yl)methoxy)-3,5-difluorophenyl)picolinamide; 5-(4-((1-(5-ethylpyrimidin-2-yl)piperidin-4-yl)methoxy)-3,5-difluorophenyl)-N-methylpicolinamide; 5-(4-((1-(5-ethylpyrimidin-2-yl)piperidin-4-yl)methoxy)-3,5-difluorophenyl)-N,N-dimethylpicolinamide; 1-methylcyclopropyl 4-((2,6-difluoro-4-(2-(piperazine-1-carbonyl)pyrimidin-5-yl)phenoxy)methyl)piperidine-1-carboxylate; 1-methylcyclopropyl 4-((4-(2-(dimethylcarbamoyl)pyrimidin-5-yl)-2,6-difluorophenoxy)methyl)piperidine-1-carboxylate; 1-methylcyclopropyl 4-((2,6-difluoro-4-(2-(morpholine-4-carbonyl)pyrimidin-5-yl)phenoxy)methyl)piperidine-1-carboxylate; 1-methylcyclopropyl 4-((2,6-difluoro-4-(2-(2-methoxyethylcarbamoyl)pyrimidin-5-yl)phenoxy)methyl)piperidine-1-carboxylate; 1-methylcyclopropyl 4-((2,6-difluoro-4-(2-oxo-2,3-dihydrooxazolo[4,5-b]pyridin-6-yl)phenoxy)methyl)piperidine-1-carboxylate; 1-methylcyclopropyl 4-((2,6-difluoro-4-(2-(2-hydroxyethylcarbamoyl)pyrimidin-5-yl)phenoxy)methyl)piperidine-1-carboxylate; and 1-methylcyclopropyl 4-((2,6-difluoro-4-(2-(3-hydroxypropylcarbamoyl)pyrimidin-5-yl)phenoxy)methyl)piperidine-1-carboxylate, or any of the compounds disclosed in WO 2010/006191, which is incorporated herein by reference in its entirety.

[0177] In embodiments wherein Y comprises a structure of Formula J, Y is conjugated to L (e.g. when L is a linking group) or Q (e.g. when L is a bond) at any position of Formula J that is capable of reacting with Q or L. One skilled in the art could readily determine the position of conjugation on Formula J and means of conjugation of Formula J to Q or L in view of general knowledge and the disclosure provided herein. In some embodiments, Formula J is conjugated to L or Q at any of position on Formula J.

GPCR Ligand that Acts at GPR30

[0178] In some embodiments of the invention, Y acts at GPR30. In some embodiments, Y can have any structure that permits or promotes agonist activity upon binding to GPR30, while in other embodiments Y is an antagonist of GPR30. In some embodiments, Y acts at GPR30 and is estrogen or a derivative of estrogen, as can be shown by Formula I:

[chemical structure]

wherein R¹, R¹² and R¹³ are moieties that permit or promote agonist or antagonist activity upon binding of the compound of Formula I to GPR30. In some embodiments, Formula I further comprises one or more substitutents at one or more of positions 1, 2, 4, 6, 7, 8, 9, 11, 12, 14, 15, and 16 (e.g. a ketone at position-6).

[0179] In some embodiments when Y comprises a structure of Formula I, wherein

[0180] R¹ is hydrogen, C₁-C₁₈ alkyl, C₂-C₁₈ alkenyl, C₂-C₁₈ alkynyl, heteroalkyl, (C₀-C₈ alkyl)aryl, (C₀-C₈ alkyl)heteroaryl, (C₀-C₈ alkyl)C(O)C₁-C₁₈ alkyl, (C₀-C₈ alkyl)C(O)C₂-C₁₈ alkenyl, (C₀-C₈ alkyl)C(O)C₂-C₁₈ alkynyl, (C₀-C₈ alkyl)C(O)H, (C₀-C₈ alkyl)C(O)aryl, (C₀-C₈ alkyl)C(O)heteroaryl, (C₀-C₈ alkyl)C(O)OC₁-C₁₈ alkyl, (C₀-C₈ alkyl)C(O)OC₂-C₁₈ alkenyl, (C₀-C₈ alkyl)C(O)OC₂-C₁₈ alkynyl, (C₀-C₈ alkyl)C(O)OH, C₀-C₈ alkyl)C(O)O aryl, (C₀-C₈ alkyl)C(O)O heteroaryl, (C₀-C₈ alkyl)C(O)NR²⁴C₁-C₁₈ alkyl, (C₀-C₈ alkyl)C(O)NR²⁴C₂-C₁₈ alkenyl, (C₀-C₈ alkyl)C(O)NR²⁴C₂-C₁₈ alkynyl, (C₀-C₈ alkyl)C(O)NR²⁴H₂, (C₀-C₈ alkyl)C(O)NR²⁴aryl, (C₀-C₈ alkyl)C(O)NR²⁴heteroaryl, or SO₃H;

[0181] R¹² is hydrogen, (C₀-C₈ alkyl)halo, C₁-C₁₈ alkyl, C₂-C₁₈ alkenyl, C₂-C₁₈ alkynyl, heteroalkyl, (C₀-C₈ alkyl)aryl, (C₀-C₈ alkyl)heteroaryl, (C₀-C₈ alkyl)OC₁-C₁₈ alkyl, (C₀-C₈ alkyl)OC₂-C₁₈ alkenyl, (C₀-C₈ alkyl)OC₂-C₁₈ alkynyl, (C₀-C₈ alkyl)OH, (C₀-C₈ alkyl)SH, (C₀-C₈ alkyl)NR²⁴C₁-C₁₈ alkyl, (C₀-C₈ alkyl)NR²⁴C₂-C₁₈ alkenyl, (C₀-C₈ alkyl)NR²⁴C₂-C₁₈ alkynyl, (C₀-C₈ alkyl)NR²⁴H₂, (C₀-C₈ alkyl)C(O)C₁-C₁₈ alkyl, (C₀-C₈ alkyl)C(O)C₂-C₁₈ alkenyl, (C₀-C₈ alkyl)C(O)C₂-C₁₈ alkynyl, (C₀-C₈ alkyl)C(O)H, (C₀-C₈ alkyl)C(O)aryl, (C₀-C₈ alkyl)C(O)heteroaryl, (C₀-C₈ alkyl)C(O)OC₁-C₁₈ alkyl, (C₀-C₈ alkyl)C(O)OC₂-C₁₈ alkenyl, (C₀-C₈ alkyl)C(O)OC₂-C₁₈ alkynyl, (C₀-C₈ alkyl)C(O)OH, (C₀-C₈ alkyl)C(O)O aryl, (C₀-C₈ alkyl)C(O)O heteroaryl, (C₀-C₈ alkyl)OC(O)C₁-C₁₈ alkyl, (C₀-C₈ alkyl)OC(O)C₂-C₁₈ alkenyl, (C₀-C₈ alkyl)OC(O)C₂-C₁₈ alkynyl, (C₀-C₈ alkyl)C(O)NR²⁴C₁-C₁₈ alkyl, (C₀-C₈ alkyl)C(O)NR²⁴C₂-C₁₈ alkenyl, (C₀-C₈ alkyl)C(O)NR²⁴C₂-C₁₈ alkynyl, (C₀-C₈ alkyl)C(O)NR²⁴H₂, (C₀-C₈ alkyl)C(O)NR²⁴aryl, (C₀-C₈ alkyl)C(O)NR²⁴heteroaryl, (C₀-C₈ alkyl)NR²⁴C(O)C₁-C₁₈ alkyl, (C₀-C₈alkyl)NR²⁴C(O)C₂-C₈ alkenyl, or (C₀-C₈ alkyl)NR²⁴C(O)C₂-C₁₈ alkynyl, (C₀-C₈ alkyl)NR²⁴C(O)OH, (C₀-C₈ alkyl)OC(O)OC₁-C₁₈ alkyl, (C₀-C₈ alkyl)OC(O)OC₂-C₁₈ alkenyl, (C₀-C₈ alkyl)OC(O)OC₂-C₁₈ alkynyl, (C₀-C₈ alkyl)OC(O)OH, (C₀-C₈ alkyl)OC(O)NR²⁴C₁-C₁₈ alkyl, (C₀-C₈ alkyl)OC(O)NR²⁴C₂-C₁₈ alkenyl, (C₀-C₈ alkyl)OC(O)NR²⁴C₂-C₁₈ alkynyl, (C₀-C₈ alkyl)OC(O)NR²⁴H₂, (C₀-C₈ alkyl)NR²⁴(O)OC₁-C₁₈ alkyl, (C₀-C₈ alkyl)NR²⁴(O)OC₂-C₁₈ alkenyl, (C₀-C₈ alkyl)NR²⁴(O)OC₂-C₁₈ alkynyl, or (C₀-C₈ alkyl)NR²⁴(O)OH; (C₀-C₈ alkyl)C(O)C₁-C₁₈ alkyl, (C₀-C₈ alkyl)C(O)C₂-C₁₈ alkenyl, (C₀-C₈ alkyl)C(O)C₂-C₁₈ alkynyl, (C₀-C₈ alkyl)C(O)OC₁-C₁₈ alkyl, (C₀-C₈ alkyl)C(O)OC₂-C₁₈ alkenyl, (C₀-C₈ alkyl)C(O)OC₂-C₁₈ alkynyl, (C₀-C₈ alkyl)C(O)OH, (C₀-C₈ alkyl)OC(O)C₁-C₁₈ alkyl, (C₀-C₈ alkyl)OC(O)C₂-C₁₈ alkenyl, (C₀-C₈ alkyl)OC(O)C₂-C₁₈ alkynyl, (C₀-C₈ alkyl)C(O)NR²⁴C₁-C₁₈ alkyl, (C₀-C₈ alkyl)C(O)NR²⁴C₂-C₁₈ alkenyl, (C₀-C₈ alkyl)C(O)NR²⁴C₂-C₁₈ alkynyl, (C₀-C₈ alkyl)C(O)NR²⁴H₂, (C₀-C₈ alkyl)NR²⁴C(O)C₁-C₁₈ alkyl, (C₀-C₈ alkyl)NR²⁴C(O)C₂-C₈ alkenyl, or (C₀-C₈ alkyl)NR²⁴C(O)C₂-C₁₈ alkynyl, or (C₀-C₈ alkyl)NR²⁴C(O)OH;

[0182] R¹³ is hydrogen, C₁-C₁₈ alkyl, C₂-C₁₈ alkenyl, C₂-C₁₈ alkynyl, heteroalkyl, (C₀-C₈ alkyl)aryl, (C₀-C₈ alkyl)heteroaryl, (C₀-C₈ alkyl)C(O)C₁-C₁₈ alkyl, (C₀-C₈ alkyl)C(O)C₂-C₁₈ alkenyl, (C₀-C₈ alkyl)C(O)C₂-C₁₈ alkynyl, (C₀-C₈ alkyl)C(O)H, (C₀-C₈ alkyl)C(O)aryl, (C₀-C₈ alkyl)C(O)heteroaryl, (C₀-C₈ alkyl)C(O)OC₁-C₁₈ alkyl, (C₀-C₈ alkyl)C(O)OC₂-C₁₈ alkenyl, (C₀-C₈ alkyl)C(O)OC₂-C₁₈ alkynyl, (C₀-C₈ alkyl)C(O)OH, C₀-C₈ alkyl)C(O)O aryl, (C₀-C₈ alkyl)C(O)O heteroaryl, (C₀-C₈ alkyl)C(O)NR²⁴C₁-C₁₈ alkyl, (C₀-C₈ alkyl)C(O)NR²⁴C₂-C₁₈ alkenyl, (C₀-C₈ alkyl)C(O)NR²⁴C₂-C₁₈ alkynyl, (C₀-C₈ alkyl)C(O)NR²⁴H₂, (C₀-C₈ alkyl)C(O)NR²⁴aryl, (C₀-C₈ alkyl)C(O)NR²⁴heteroaryl, or SO₃H; and,

[0183] R²⁴ is hydrogen or C₁-C₁₈ alkyl.

[0184] In some embodiments, Y acts at GPR30 and comprises a structure of Formula I, wherein

[0185] R¹ is hydrogen, C₁-C₇ alkyl; (C₀-C₃ alkyl)C(O)C₁-C₇ alkyl, (C₀-C₃ alkyl)C(O)aryl, or SO₃H;

[0186] R¹² is hydrogen, (C₀-C₈ alkyl)halo, C₁-C₈ alkyl, C₂-C₈ alkenyl, C₂₋₁₈ alkynyl, heteroalkyl, (C₀-C₈ alkyl)aryl, (C₀-C₈ alkyl)heteroaryl, (C₀-C₈ alkyl)OC₁-C₈ alkyl, (C₀-C₈ alkyl)OC₂-C₈ alkenyl, (C₀-C₈ alkyl)OC₂-C₈ alkynyl, (C₀-C₈ alkyl)OH, (C₀-C₈ alkyl)SH, (C₀-C₈ alkyl)NR²⁴C₁-C₈ alkyl, (C₀-C₈ alkyl)NR²⁴C₂-C₈ alkenyl, (C₀-C₈ alkyl)NR²⁴C₂-C₈ alkynyl, (C₀-C₈ alkyl)NR²⁴H₂, (C₀-C₈ alkyl)C(O)C₁-C₈ alkyl, (C₀-C₈ alkyl)C(O)C₂-C₈ alkenyl, (C₀-C₈ alkyl)C(O)C₂-C₈ alkynyl, (C₀-C₈ alkyl)C(O)H, (C₀-C₈ alkyl)C(O)aryl, (C₀-C₈ alkyl)C(O)heteroaryl, (C₀-C₈ alkyl)C(O)OC₁-C₈ alkyl, (C₀-C₈ alkyl)C(O)OC₂-C₈ alkenyl, (C₀-C₈ alkyl)C(O)OC₂-C₈ alkynyl, (C₀-C₈ alkyl)C(O)OH, (C₀-C₈ alkyl)C(O)O aryl, (C₀-C₈ alkyl)C(O)O heteroaryl, (C₀-C₈ alkyl)OC(O)C₁-C₈ alkyl, (C₀-C₈ alkyl)OC(O)C₂-C₈ alkenyl, (C₀-C₈ alkyl)OC(O)C₂-C₁₈ alkynyl, (C₀-C₈ alkyl)C(O)NR²⁴C₁-C₈ alkyl, (C₀-C₈ alkyl)C(O)NR²⁴C₂-C₈ alkenyl, (C₀-C₈ alkyl)C(O)NR²⁴C₂-C₈ alkynyl, (C₀-C₈ alkyl)C(O)NR²⁴H₂, (C₀-C₈ alkyl)C(O)NR²⁴aryl, (C₀-C₈ alkyl)C(O)NR²⁴heteroaryl, (C₀-C₈ alkyl)NR²⁴C(O)C₁-C₈ alkyl, (C₀-C₈ alkyl)NR²⁴C(O)C₂-C₈ alkenyl, or (C₀-C₈ alkyl)NR²⁴C(O)C₂-C₈ alkynyl, (C₀-C₈ alkyl)NR²⁴C(O)OH, (C₀-C₈ alkyl)OC(O)OC₁-C₈ alkyl, (C₀-C₈ alkyl)OC(O)OC₂-C₈ alkenyl, (C₀-C₈ alkyl)OC(O)OC₂-C₈ alkynyl, (C₀-C₈ alkyl)OC(O)OH, (C₀-C₈ alkyl)OC(O)NR²⁴C₁-C₈ alkyl, (C₀-C₈ alkyl)OC(O)NR²⁴C₂-C₈ alkenyl, (C₀-C₈ alkyl)OC(O)NR²⁴C₂-C₈ alkynyl, (C₀-C₈ alkyl)OC(O)NR²⁴H₂, (C₀-C₈ alkyl)NR²⁴(O)OC₁₈ alkyl, (C₀-C₈ alkyl)NR²⁴(O)OC₂-C₈ alkenyl, (C₀-C₈ alkyl)NR²⁴(O)OC₂-C₈ alkynyl, or (C₀-C₈ alkyl)NR²⁴(O)OH;

[0187] R¹³ is hydrogen, C₁-C₈ alkyl, C₂-C₈ alkenyl, C₂-C₈ alkynyl, heteroalkyl, (C₀-C₈ alkyl)aryl, (C₀-C₈ alkyl)heteroaryl, (C₀-C₈ alkyl)C(O)C₁-C₈ alkyl, (C₀-C₈ alkyl)C(O)C₂-C₈ alkenyl, (C₀-C₈ alkyl)C(O)C₂-C₈ alkynyl, (C₀-C₈ alkyl)C(O)H, (C₀-C₈ alkyl)C(O)aryl, (C₀-C₈ alkyl)C(O)heteroaryl, (C₀-C₈ alkyl)C(O)OC₁-C₈ alkyl, (C₀-C₈ alkyl)C(O)OC₂-C₈ alkenyl, (C₀-C₈ alkyl)C(O)OC₂-C₈ alkynyl, (C₀-C₈ alkyl)C(O)OH, C₀-C₈ alkyl)C(O)O aryl, (C₀-C₈ alkyl)C(O)O heteroaryl, (C₀-C₈ alkyl)C(O)NR²⁴C₁-C₈ alkyl, (C₀-C₈ alkyl)C(O)NR²⁴C₂-C₈ alkenyl, (C₀-C₈ alkyl)C(O)NR²⁴C₂-C₈ alkynyl, (C₀-C₈ alkyl)C(O)NR²⁴H₂, (C₀-C₈ alkyl)C(O)NR²⁴aryl, or (C₀-C₈ alkyl)C(O)NR²⁴heteroaryl; and

[0188] R²⁴ is hydrogen or C₁-C₇ alkyl.

[0189] For example, R¹ is hydrogen, propionate, acetate, benzoate, or sulfate; R¹² is hydrogen, ethynyl, hydroxyl; and R¹³ is acetate, cypionate, hemisucciniate, enanthate, or propionate.

[0190] Nonlimiting examples of the compound of Formula I include 17β-estradiol, modified forms of estradiol such as β-estradiol 17-acetate, β-estradiol 17-cypionate, β-estradiol 17-enanthate, β-estradiol 17-valerate, β-estradiol 3,17-diacetate, β-estradiol 3,17-dipropionate, β-estradiol 3-benzoate, β-estradiol 3-benzoate 17-n-butyrate, β-estradiol 3-glycidyl ether, β-estradiol 3-methyl ether, β-estradiol 6-one, β-estradiol 3-glycidyl, β-estradiol 6-one 6-(O-carboxymethyloxime), 16-epiestriol, 17-epiestriol, 2-methoxy estradiol, 4-methoxy estradiol, estradiol 17-phenylpropionate, and 17β-estradiol 2-methyl ether, 17α-ethynylestradiol, megestrol acetate, estriol, and derivatives thereof. In some embodiments, carbon 17 has a ketone substitutent and R⁵ and R⁶ are absent (e.g. estrone). Some of the aforementioned compounds of Formula I are shown below:

[chemical structure]

[0191] Other examples of ligands that act at GPR30 are described in Martensson et al., Endocrinology 150(2):687-698 (2009), which is incorporated herein by reference in its entirety for each of its disclosures of GPR30 ligands.

[0192] In embodiments wherein Y comprises a structure of Formula I, Y is conjugated to L (e.g. when L is a linking group) or Q (e.g. when L is a bond) at any position of Formula I that is capable of reacting with Q or L. One skilled in the art could readily determine the position of conjugation on Formula I and means of conjugation of Formula I to Q or L in view of general knowledge and the disclosure provided herein. In some embodiments, Formula I is conjugated to L or Q at any of positions 1, 2, 3, 4, 5, 6, 7, 8, 9, 10, 11, 12, 13, 14, 15, 16, 17, 18, 19, or 20 of Formula I. In some embodiments, Formula B is conjugated to L or Q at position 3 or 17 of Formula I.

GPCR Ligand that Acts at GPR40

[0193] In some embodiments of the invention, Y acts at GPR40. In some embodiments, Y can have any structure that permits or promotes agonist activity upon binding to GPR40, while in other embodiments Y is an antagonist of GPR40.

[0194] In some embodiments, Y acts at GPR40 and is a free fatty acid or derivative thereof, as shown in Formula B:

[chemical structure]

wherein n is 0-26 and each R⁵, when present, are each independently a moiety that permits or promotes agonist or antagonist activity upon binding of the compound of Formula B to GPR40. In some embodiments, Y acts at GPR40 and comprises a structure of Formula B, wherein n is 4-26 and each R⁵, when present, are each independently a moiety that permits or promotes agonist or antagonist activity upon binding of the compound of Formula B to GPR40. In some embodiments, Y acts at GPR40 and comprises a structure of Formula B, wherein n is 4-26 and each R⁵, when present, is independently hydrogen, C₁-C₇ alkyl or halogen. Nonlimiting examples of Y is these embodiments include: n-caproic acid, heptanoic acid, caprylic acid, nonanoic acid, capric acid, undecanoic acid, lauric acid, tridecanoic acid, myristic acid, pentadeconoic acid, palmitic acid, heptadecanoic acid, stearic acid, nonadecanoic acid, arachidic acid, heneicosanoic acid, behenic acid, and tricosanoic acid. In some embodiments Y acts at GPR40 and is unsaturated with either cis or trans stereochemistry such as, for example, mead acid, myristoleic acid, palmitoleic acid, sapienic acid, oleic acid, linoleic acid, α-linolenic acid, elaidic acid, retinal, tretinoin, petroselinic acid, arachidonic acid, dihydroxyeicosatetraenoic acid (DiHETE), octadecynoic acid, eicosatriynoic acid, eicosadienoic acid, eicosatrienoic acid, eicosapentaenoic acid, erucic acid, dihomolinolenic acid, docosatrienoic acid, docosapentaenoic acid, docosahexaenoic acid, and adrenic acid. In exemplary embodiments, Y acts at GPR40 and is pentanoic acid, palmitic acid, linoleic acid, or eicosatrienoic acid.

[0195] In some embodiments, Y acts at GPR40 and comprises a structure of Formula B further modified with a moiety (e.g. carboxylic acid, carboxylic acid derivative, amide) at its tail. In some embodiments, Y acts at GPR40 and is MEDICA16, as shown below:

[chemical structure]

[0196] In embodiments wherein Y comprises a structure of Formula B, Y is conjugated to L (e.g. when L is a linking group) or Q (e.g. when L is a bond) at any position of Formula B that is capable of reacting with Q or L. One skilled in the art could readily determine the position of conjugation on Formula B and means of conjugation of Formula B to Q or L in view of general knowledge and the disclosure provided herein. In some embodiments, Formula B is conjugated to L or Q at any position on Formula B. In some embodiments, Formula B is conjugated to L or Q through the terminal carboxylic acid moiety.

[0197] In some embodiments, Y acts at GPR40 and is diacetylphloroglucinol or a derivative thereof, as shown in Formula F:

[chemical structure]

wherein each m is independently 0-15, and each R¹⁰ is independently a moiety that permits or promotes agonist or antagonist activity upon binding of the compound of Formula F to GPR40. In some embodiments, Y acts at GPR40 and comprises a structure of Formula F, wherein each m is independently 0-15; and each R¹⁰ is independently hydrogen or C₁-C₁₈ alkyl. In some embodiments, Y acts at GPR40 and is a compound of Formula F, wherein each m is 9 and each R¹⁰ is hydrogen, as shown below:

[chemical structure]

[0198] In embodiments wherein Y comprises a structure of Formula F, Y is conjugated to L (e.g. when L is a linking group) or Q (e.g. when L is a bond) at any position of Formula F that is capable of reacting with Q or L. One skilled in the art could readily determine the position of conjugation on Formula F and means of conjugation of Formula F to Q or L in view of general knowledge and the disclosure provided herein. In some embodiments, Formula F is conjugated to L or Q at any position on Formula F. In some embodiments, Formula F is conjugated to L or Q through a hydroxyl moiety.

[0199] In some embodiments, Y acts at GPR40 and is retinoic acid or a derivative thereof, as shown in Formula G:

[chemical structure]

wherein R¹¹ is a moiety that permits or promotes agonist or antagonist activity upon the binding of the compound of Formula G to GPR40, and [symbol] represents either E or Z stereochemistry. In some embodiments, Y acts at GPR40 and comprises a structure of Formula G wherein R¹¹ is C(O)OH, CH₂OH, or C(O)H. In some embodiments, Y acts at GPR40 and comprises a structure of Formula G wherein R¹¹ is a carboxylic acid derivative. Nonlimiting examples of the compound of Formula G include:

[chemical structure]

and derivatives thereof.

[0200] In embodiments wherein Y comprises a structure of Formula G, Y is conjugated to L (e.g. when L is a linking group) or Q (e.g. when L is a bond) at any position of Formula G that is capable of reacting with Q or L. One skilled in the art could readily determine the position of conjugation on Y and means of conjugation of Y to Q or L in view of general knowledge and the disclosure provided herein. In some embodiments, Y is conjugated to L or Q through any position of Y. In some embodiments, Formula G is conjugated to L or Q at R¹¹.

[0201] In some embodiments, Y acts at GPR40 and is a thiazolidinedione compound comprising a structure as described by Formula H:

[chemical structure]

Nonlimiting examples of the compound of Formula H include:

[chemical structure]

and derivatives thereof.

[0202] In embodiments wherein Y comprises a structure of Formula H, Y is conjugated to L (e.g. when L is a linking group) or Q (e.g. when L is a bond) at any position of Formula H that is capable of reacting with Q or L. One skilled in the art could readily determine the position of conjugation on Formula H and means of conjugation of Formula H to Q or L in view of general knowledge and the disclosure provided herein. In some embodiments, Formula H is conjugated to L or Q at any position on Formula H.

[0203] In some embodiments, Y is a small molecule having a molecular weight of up to about 5000 daltons, or up to about 2000 daltons, or up to about 1000 daltons, or up to about 500 daltons that permits or promotes agonist or antagonist activity at GPR40. In some embodiments, Y is 1000 daltons or less. Nonlimiting examples of small molecules that permit or promote agonist or antagonist activity at GPR40 include:

[chemical structure]

[0204] In the embodiments wherein Y is a GPCR ligand of low molecular weight, Y is conjugated to L (e.g. when L is a linking group) or Q (e.g. when L is a bond) at any position of Y that is capable of reacting with Q or L. One skilled in the art could readily determine the position of conjugation on Y and means of conjugation of Y to Q or L in view of general knowledge and the disclosure provided herein. In some embodiments, Formula H is conjugated to L or Q through a hydroxyl moiety, through an aromatic moiety, or through a carboxylic acid of Formula H.

[0205] In some embodiments, Y is grifolic acid or a derivative thereof, which permits or promotes antagonist activity at GPR40, as shown in Formula E:

[chemical structure]

wherein each R⁹ is independently a moiety that permits or promotes antagonist activity upon binding of the compound of Formula E to GPR40. In some embodiments, Y acts at GPR40 and comprises a structure of Formula E, wherein each R⁹ is independently hydrogen, OH, or O(C₁-C₈ alkyl). Nonlimiting examples of Y in these embodiments include grifolic acid and grifolic acid methyl ether, shown below:

[chemical structure]

and derivatives thereof.

[0206] In embodiments wherein Y comprises a structure of Formula E, Y is conjugated to L (e.g. when L is a linking group) or Q (e.g. when L is a bond) at any position of Formula E that is capable of reacting with Q or L. One skilled in the art could readily determine the position of conjugation on Formula E and means of conjugation of Formula E to Q or L in view of general knowledge and the disclosure provided herein. In some embodiments, Formula E is conjugated to L or Q at any position on Formula E. In some embodiments, Formula E is conjugated to L or Q through a carboxylic acid or hydroxyl moiety.

[0207] Other examples of ligands that act at GPR40 are described in Briscoe et al., J. Biol. Chem., 278:11303-11311 (2003); Briscoe et al., Br. J. Pharmacol. 148:619-628 (2006); Davi et al., Chem. Commun. 40:4974-4976 (2008); Kebede et al., Diabetes, 57:2432-2437 (2008); Hara et al., Mol. Pharmacol. 75:85-91 (2009); Hirasawa et al., Biol. Pharm. Bull. 31:1847-1851 (2008); Suzuki et al., J. Med. Chem. 51:7640-7644 (2008); Tikhonove et al., J. Med. Chem. 50:2981-2989 (2007), and Zhou et al. Bioorg. Med. Chem. Lett. 18:6357-6361 (2008); each and all of which are incorporated herein by reference for each of their disclosures of GPR40 ligands.

GPCR Ligand that Acts on GPR119

[0208] In some embodiments of the invention, Y acts at GPR119. In some embodiments, Y can have any structure that permits or promotes agonist activity upon binding to GPR119, while in other embodiments Y is an antagonist of GPR119.

[0209] In some embodiments, Y acts at GPR119 and is a free fatty amide or derivative thereof, as shown in Formula C:

[chemical structure]

wherein n is 0-26 and each R⁵, when present, is independently a moiety that permits or promotes agonist or antagonist activity upon binding of the compound of Formula C to GPR119. In some embodiments, Y acts at GPR119 and comprises a structure of Formula C, wherein n is 0-26; each R⁵, when present, is independently hydrogen, C₁-C₇ alkyl, or halogen; and R⁶ is hydrogen, C₁-C₁₈ alkyl, (C₁-C₁₈ alkyl)OH, (C₁-C₁₈ alkyl)NH₂, (C₀-C₈ alkyl)halo, C₂-C₁₈ alkenyl, C₂-C₁₈ alkynyl, heteroalkyl, (C₀-C₈ alkyl)aryl, or (C₀-C₈ alkyl)heteroaryl. In some embodiments Formula C is saturated, while is other embodiments, Formula C is unsaturated with either cis or trans stereochemistry.

[0210] In some embodiments, Y acts at GPR119 and comprises a structure of Formula C, wherein n is 4-26; each R⁵, when present, is hydrogen; and R⁶ is hydrogen. For example, Y acts at GPR119 and is oleamide, as shown below:

[chemical structure]

[0211] In some embodiments, Y acts at GPR119 and comprises a structure of Formula C, wherein n is 4-26; each R⁵, when present, is independently hydrogen or halogen; and R⁶ is (C₁-C₈ alkyl)OH. Nonlimiting examples of compounds of Formula C when R⁶ is (C₁-C₈ alkyl)OH include:

[chemical structure]

and derivatives thereof.

[0212] In some embodiments, Y acts at GPR119 and comprises a structure of Formula C, wherein n is 4-26; each R⁵, when present, is independently hydrogen or halogen; and R⁶ is (C₁-C₃ alkyl)aryl. For example, Y acts at GPR119 and is N-oleoyldopamine, as shown below:

[chemical structure]

[0213] In embodiments wherein Y comprises a structure of Formula C, Y is conjugated to L (e.g. when L is a linking group) or Q (e.g. when L is a bond) at any position of Formula C that is capable of reacting with Q or L. One skilled in the art could readily determine the position of conjugation on Formula C and means of conjugation of Formula C to Q or L in view of general knowledge and the disclosure provided herein. In some embodiments, Formula C is conjugated to L or Q at any position on Formula C. In some embodiments, Formula C is conjugated to L or Q through a terminal carboxylic acid or hydroxyl moiety.

[0214] In some embodiments of the invention, Y acts at GPR119 and is a phospholipid or derivative thereof, as shown in Formula D:

[chemical structure]

wherein n is 0-26, each R⁵, R⁷, and R⁸ are moieties that permit or promote agonist or antagonist activity upon binding of the compound of Formula D to GPR119. In some embodiments, Y acts at GPR119 and comprises a structure of Formula D, wherein n is 0-26; each R⁵, when present, is independently hydrogen, C₁-C₇ alkyl, or halogen; R⁷ is choline, ethanolamine, or inositol; and R⁸ is hydrogen of

[chemical structure]

In some embodiments Formula D is saturated, while in other embodiments, Formula D is unsaturated with either cis or trans stereochemistry.

[0215] In some embodiments, Y acts at GPR119 and comprises a structure of Formula D, wherein each n is independently 4-26; each R⁵, when present, is independently hydrogen or halogen; R⁷ is choline; and R⁸ is

[chemical structure]

as shown below:

[chemical structure]

For example, Y acts at GPR119 and is 1-palmitoyl-2-oleo-sn-glycero-3-phosphocholine, as shown below:

[chemical structure]

[0216] In some embodiments, Y acts at GPR119 and comprises a structure of Formula D, wherein n is 4-26; each R⁵, when present, is independently hydrogen or halogen; R⁷ is choline; and R⁸ is acetyl, as shown below:

[chemical structure]

[0217] In some embodiments, Y acts at GPR119 and comprises a structure of Formula D, wherein n is 4-26; each R⁵, when present, is independently hydrogen or halogen; R⁷ is choline; and R⁸ is OH, as shown below:

[chemical structure]

Nonlimiting examples of Y in these embodiments include:

[chemical structure]

and derivatives thereof.

[0218] In some embodiments, Y acts at GPR119 and comprises a structure of Formula D, wherein n is 4-26; each R⁵, when present, is independently hydrogen or halogen; R⁷ is ethanolamine, and R⁸ is OH, as shown below:

[chemical structure]

Nonlimiting examples of Y in these embodiments include:

[chemical structure]

[0219] In some embodiments, Y acts at GPR119 and comprises a structure of Formula D, wherein n is 4-26; each R⁵, when present, is independently hydrogen or halogen; R⁷ is inositol, and R⁸ is OH, as shown below:

[chemical structure]

Nonlimiting examples of Y in these embodiments include:

[chemical structure]

and derivatives thereof.

[0220] In embodiments wherein Y comprises a structure of Formula D, Y is conjugated to L (e.g. when L is a linking group) or Q (e.g. when L is a bond) at any position of Formula D that is capable of reacting with Q or L. One skilled in the art could readily determine the position of conjugation on Formula D and means of conjugation of Formula D to Q or L in view of general knowledge and the disclosure provided herein. In some embodiments, Formula D is conjugated to L or Q through a terminal carboxylic acid, amino, or hydroxyl moiety.

[0221] In some embodiments, Y acts at GPR119 and is retinoic acid or a derivative thereof, as shown in Formula G:

[chemical structure]

wherein R¹¹ is a moiety that permits or promotes agonist or antagonist activity upon the binding of the compound of Formula G to GPR119, and [symbol] represents either E or Z stereochemistry. In some embodiments, Y acts at GPR119 and comprises a structure of Formula G wherein R¹¹ is C(O)OH, CH₂OH, or C(O)H. In some embodiments, Y acts at GPR119 and comprises a structure of Formula G wherein R¹¹ is a carboxylic acid derivative. Nonlimiting examples of the compound of Formula G include:

[chemical structure]

and derivatives thereof. In some embodiments, Y acts at GP119 and is all-trans-retinoic acid.

[0222] In embodiments wherein Y comprises a structure of Formula G, Y is conjugated to L (e.g. when L is a linking group) or Q (e.g. when L is a bond) at any position of Formula G that is capable of reacting with Q or L. One skilled in the art could readily determine the position of conjugation on Y and means of conjugation of Y to Q or L in view of general knowledge and the disclosure provided herein. In some embodiments, Y is conjugated to L or Q through any position of Y. In some embodiments, Formula G is conjugated to L or Q at R¹¹.

[0223] In some embodiments of the invention, Y is small molecule having a molecular weight of up to about 5000 daltons, or up to about 2000 daltons, or up to about 1000 daltons, or up to about 500 daltons that permits or promotes agonist or antagonist activity at GPR119. In some embodiments, Y is 1000 daltons or less. Nonlimiting examples of small molecules that permit or promote agonist or antagonist activity at a GPR119 include:

[chemical structure]

and derivatives thereof.

[0224] In the embodiments wherein Y is a GPCR ligand of low molecular weight, Y is conjugated to L (e.g. when L is a linking group) or Q (e.g. when L is a bond) at any position of Y that is capable of reacting with Q or L. One skilled in the art could readily determine the position of conjugation on Y and means of conjugation of Y to Q or L in view of general knowledge and the disclosure provided herein. In some embodiments, Y is conjugated to L or Q through any position of Y, such as, for example, a carboxylic acid or an alcohol moiety.

### 4-Phenoxymethylpiperidines

[0225] In some embodiments of the invention, Y acts at GPR119 and comprises a structure of Formula J:

[chemical structure]

wherein R¹⁴ and R¹⁵ are each moieties that permits or promotes agonist or antagonist activity at a GPCR. In some embodiments, Y comprises a structure of Formula J wherein

[0226] R¹⁴ is phenyl, pyridin-2-yl, pyridin-3-yl, pyridin-4-yl, pyrimidin-5-yl, pyrazol-4-yl, 1H-pyrazol-4-yl, 6-oxo-1,6-dihydropyridin-3-yl, 2-oxo-1,2-dihydropyrimidin-5-yl, 2-oxo-1,2-dihydropyridin-4-yl and 2-oxo-2,3-dihydrooxazolo[4,5-b]pyridin-6-yl;

[0227] wherein said phenyl, pyridin-2-yl, pyridin-3-yl, pyridin-4-yl, pyrimidin-5-yl, pyrazol-4-yl, 1H-pyrazol-4-yl, 6-oxo-1,6-dihydropyridin-3-yl, 2-oxo-1,2-dihydropyrimidin-5-yl, 2-oxo-1,2-dihydropyridin-4-yl or 2-oxo-2,3-dihydrooxazolo[4,5-b]pyridin-6-yl of R¹⁴ is optionally substituted with 1 to 3 radicals independently selected from halo, —X¹R¹⁶, —X¹OR¹⁶, —X¹C(O)R¹⁶, —X¹C(O)OR¹⁶, —X²NR¹⁶C(O)R¹⁶, —X¹S(O)₂R¹⁶, —X¹NR¹⁶S(O)₂R¹⁶, —X¹C(O)NR¹⁶R¹⁷, —X¹C(O)NR¹⁶X²OR¹⁷, —X¹C(O)NR¹⁶X²NR¹⁶R¹⁷, —X¹C(O)NR¹⁶X²C(O)OR¹⁷, —X¹S(O)O₂X²R¹⁶, —X¹S(O)₀₋₂X²OR¹⁶, —X²CN, —X¹OX²R¹⁶, —X¹NR¹⁷X²R¹⁶, —X²NR¹⁶R¹⁷, —X¹S(O)₀₋₂X²C(O)R¹⁶, —X¹S(O)₀₋₂X²C(O)OR¹⁶ and —X¹S(O)₀₋₂NR¹⁶R¹⁷;

[0228] wherein X¹ is selected from a bond, O, NR¹⁷ and C₁₄alkyl;

[0229] R¹⁷ is selected from hydrogen and C₁₋₆alkyl;

[0230] each X² is independently selected from a bond and C₁₋₄alkyl;

[0231] each R¹⁶ is independently selected from hydrogen, C₁₋₆ alkyl, C₆₋₁₀aryl, C₁₋₁₀heteroaryl,

[0232] C₃₋₈heterocycloalkyl, C₃₋₈cycloalkyl and —X³C(O)OR¹⁸, —X³R¹⁸—X³OR¹⁸—X³NR¹⁸R¹⁹;

[0233] wherein said alkyl, aryl, heteroaryl, cycloalkyl and heterocycloalkyl of R¹⁶ is optionally substituted with 1 to 3 radicals independently selected from hydroxy, halo, amino, cyano, C₁₋₆alkyl, halo-substituted-C₁₋₆alkyl, hydroxy-substituted-C₁₋₆alkyl, C₁₋₆alkoxy, halo-substituted-C₁-6alkoxy, C₆₋₁₀aryl-C₁₋₄alkoxy and —NR¹⁸C(O)R¹⁹; X³ is C₁₋₃alkyl; and

[0234] R¹⁸ is selected from hydrogen, C₁₋₆alkyl and C₃₋₈heterocycloalkyl optionally substituted with C₁₋₆alkyl;

[0235] R¹⁹ are independently selected from hydrogen and C₁₋₆ alkyl;

[0236] and R¹⁵ is selected from R²⁰ and —C(O)OR²⁰;

[0237] wherein R²⁰ is selected from C₁₋₆alkyl, C₆₋₁₀aryl, C₁₋₁₀heteroaryl, C₃₋₈cycloalkyl and C₃₋₈heterocycloalkyl;

[0238] wherein said alkyl, aryl, heteroaryl, cycloalkyl or heterocycloalkyl of R²⁰ is optionally substituted with 1 to 3 radicals independently selected from halo, C₁₋₆alkyl, C₃₋₁₂cycloalkyl, C₃₋₈heterocycloalkyl, halo-substituted-C₁₋₆alkyl, hydroxy-substituted-C₁₋₆alkyl, and halo-substituted-C₁₋₆alkoxy; or the pharmaceutically acceptable salts thereof.

[0239] Nonlimiting examples of 4-phenoxymethylpiperidine compounds that permit or promote agonist or antagonist activity at a GPCR include: 2-(4-((2,6-difluoro-4-(5-(methylsulfonyl)pyridin-2-yl)phenoxy)methyl)piperidin-1-yl)-5-ethylpyrimidine; tert-butyl 4-((3,5-difluoro-4′-(methylsulfonyl)biphenyl-4-yloxy)methyl)piperidine-1-carboxylate; 2-(4-((3,5-difluoro-4′-((3-methyloxetan-3-yl)methylsulfonyl)biphenyl-4-yloxy)methyl)piperidin-1-yl)-5-ethylpyrimidine; 2-(4-((3,5-difluoro-4′-(isobutylsulfonyl)biphenyl-4-yloxy)methyl)piperidin-1-yl)-5-ethylpyrimidine; 2-(4-((3,5-difluoro-4′-(propylsulfonyl)biphenyl-4-yloxy)methyl)piperidin-1-yl)-5-ethylpyrimidine; 2-(4-((3,5-difluoro-4′-(methylsulfonyl)biphenyl-4-yloxy)methyl)piperidin-1-yl)-5-ethylpyrimidine; 2-(44(3,5-difluoro-4′-(isopropylsulfonyl)biphenyl-4-yloxy)methyl)piperidin-1-yl)-5-ethylpyrimidine; 4′-((1-(5-ethylpyrimidin-2-yl)piperidin-4-yl)methoxy)-3′,5′-difluorobiphenyl-4-carbonitrile; 4′-((1-(5-ethylpyrimidin-2-yl)piperidin-4-yl)methoxy)-3′,5′-difluorobiphenyl-3-carbonitrile; 2-(4′-((1-(5-ethylpyrimidin-2-yl)piperidin-4-yl)methoxy)-3′,5′-difluorobiphenyl-3-yl)acetonitrile; (4′-((1-(5-ethylpyrimidin-2-yl)piperidin-4-yl)methoxy)-3′,5′-difluorobiphenyl-3-yl)methanol; 2-(4-((3,5-difluoro-3′-(methylsulfonyl)biphenyl-4-yloxy)methyl)piperidin-1-yl)-5-ethylpyrimidine; 2-(4′-((1-(5-ethylpyrimidin-2-yl)piperidin-4-yl)methoxy)-3′,5′-difluorobiphenyl-4-yl)acetonitrile; (4′-((1-(5-ethylpyrimidin-2-yl)piperidin-4-yl)methoxy)-3′,5′-difluorobiphenyl-4-yl)methanol; 2-(4-((2,6-difluoro-4-(2-(pyrrolidin-1-yl)pyrimidin-5-yl)phenoxy)methyl)piperidin-1-yl)-5-ethylpyrimidine; 2-(4-((2,6-difluoro-4-(pyrimidin-5-yl)phenoxy)methyl)piperidin-1-yl)-5-ethylpyrimidine; 2-(4-((3,5-difluorobiphenyl-4-yloxy)methyl)piperidin-1-yl)-5-ethylpyrimidine; 2-(4-((2,6-difluoro-4-(pyridin-4-yl)phenoxy)methyl)piperidin-1-yl)-5-ethylpyrimidine; tert-butyl 4-((2,6-difluoro-4-(2-methoxypyridin-4-yl)phenoxy)methyl)piperidine-1-carboxylate; tert-butyl 4-((2,6-difluoro-4-(pyridin-4-yl)phenoxy)methyl)piperidine-1-carboxylate; 2-(4-((2,6-difluoro-4-(6-(methylsulfonyl)pyridin-3-yl)phenoxy)methyl)piperidin-1-yl)-5-ethylpyrimidine; 2-(4-((4-(6-chloro-2-methylpyridin-3-yl)-2,6-difluorophenoxy)methyl)piperidin-1-yl)-5-ethylpyrimidine; 2-(4-((2,6-difluoro-4-(1-methyl-1H-pyrazol-4-yl)phenoxy)methyl)piperidin-1-yl)-5-ethylpyrimidine; 2-(4-((2,6-difluoro-4-(1H-pyrazol-4-yl)phenoxy)methyl)piperidin-1-yl)-5-ethylpyrimidine; 5-(4-((1-(5-ethylpyrimidin-2-yl)piperidin-4-yl)methoxy)-3,5-difluorophenyl)picolinonitrile; 2-(4-((2,6-difluoro-4-(3-methoxypyridin-4-yl)phenoxy)methyl)piperidin-1-yl)-5-ethylpyrimidine; N-(4′-((1-(5-ethylpyrimidin-2-yl)piperidin-4-yl)methoxy)-3′,5′-difluorobiphenyl-4-yl)acetamide; N-(4′-((1-(5-ethylpyrimidin-2-yl)piperidin-4-yl)methoxy)-3′,5′-difluorobiphenyl-4-yl)methanesulfonamide; 2-(4-((4-(6-(benzyloxy)pyridin-3-yl)-2,6-difluorophenoxy)methyl)piperidin-1-yl)-5-ethylpyrimidine; 5-(4-((1-(5-ethylpyrimidin-2-yl)piperidin-4-yl)methoxy)-3,5-difluorophenyl)pyridin-2(1H)-one; 2-(4-((2,6-difluoro-4-(2-methoxypyrimidin-5-yl)phenoxy)methyl)piperidin-1-yl)-5-ethylpyrimidine; 5-(4-((1-(5-ethylpyrimidin-2-yl)piperidin-4-yl)methoxy)-3,5-difluorophenyl)pyrimidin-2(1H)-one; 5-(4-((1-(5-ethylpyrimidin-2-yl)piperidin-4-yl)methoxy)-3,5-difluorophenyl)pyrimidine-2-carboxamide; tert-butyl 4-((2,6-difluoro-4-(pyridin-3-yl)phenoxy)methyl)piperidine-1-carboxylate; 5-(4-((1-(5-ethylpyrimidin-2-yl)piperidin-4-yl)methoxy)-3,5-difluorophenyl)pyrimidine-2-carboxylic acid; 2 (5 (4 ((1 (5 ethylpyrimidin-2-yl)piperidin-4-yl)methoxy)-3,5-difluorophenyl)pyridin-2-yl)propan-2-ol; 2-(4-((3,5-difluoro-4′-(1H-tetrazol-5-yl)biphenyl-4-yloxy)methyl)piperidin-1-yl)-5-ethylpyrimidine; 2-(4-((3,5-difluoro-3′-(2H-tetrazol-5-yl)biphenyl-4-yloxy)methyl)piperidin-1-yl)-5-ethylpyrimidine; 2-(4-((3′-((2H-tetrazol-5-yl)methyl)-3,5-difluorobiphenyl-4-yloxy)methyl)piperidin-1-yl)-5-ethylpyrimidine; 2-(4-((4′-((2H-tetrazol-5-yl)methyl)-3,5-difluorobiphenyl-4-yloxy)methyl)piperidin-1-yl)-5-ethylpyrimidine; 2-(4-((4-(6-(2H-tetrazol-5-yl)pyridin-3-yl)-2,6-difluorophenoxy)methyl)piperidin-1-yl)-5-ethylpyrimidine; 2-(4-((3,5-difluoro-4′-(2-methyl-2H-tetrazol-5-yl)biphenyl-4-yloxy)methyl)piperidin-1-yl)-5-ethylpyrimidine; 2-(4-((3,5-difluoro-4′-(1-methyl-1H-tetrazol-5-yl)biphenyl-4-yloxy)methyl)piperidin-1-yl)-5-ethylpyrimidine; 2-(4-((3,5-difluoro-3′-(2-methyl-2H-tetrazol-5-yl)biphenyl-4-yloxy)methyl)piperidin-1-yl)-5-ethylpyrimidine; 2-(4-((3,5-difluoro-3′-(1-methyl-1H-tetrazol-5-yl)biphenyl-4-yloxy)methyl)piperidin-1-yl)-5-ethylpyrimidine; 2-(4-((3,5-difluoro-3′-((2-methyl-2H-tetrazol-5-yl)methyl)biphenyl-4-yloxy)methyl)piperidin-1-yl)-5-ethylpyrimidine; 2-(4-((3,5-difluoro-3′-((1-methyl-1H-tetrazol-5-yl)methyl)biphenyl-4-yloxy)methyl)piperidin-1-yl)-5-ethylpyrimidine; 2-(4-((3,5-difluoro-4′-((2-methyl-2H-tetrazol-5-yl)methyl)biphenyl-4-yloxy)methyl)piperidin-1-yl)-5-ethylpyrimidine; 2-(4-((3,5-difluoro-4′-((1-methyl-1H-tetrazol-5-yl)methyl)biphenyl-4-yloxy)methyl)piperidin-1-yl)-5-ethylpyrimidine; 2-(4-((2,6-difluoro-4-(6-(2-methyl-2H-tetrazol-5-yl)pyridin-3-yl)phenoxy)methyl)piperidin-1-yl)-5-ethylpyrimidine; 2-(4-((2,6-difluoro-4-(6-(1-methyl-1H-tetrazol-5-yl)pyridin-3-yl)phenoxy)methyl)piperidin-1-yl)-5-ethylpyrimidine; 1-methylcyclopropyl 4-((3,5-difluoro-4′-(methylsulfonyl)biphenyl-4-yloxy)methyl)piperidine-1-carboxylate; 4-(4-((1-(tert-butoxycarbonyl)piperidin-4-yl)methoxy)-3,5-difluorophenyl)pyridine 1-oxide; tert-butyl 4-((2,6-difluoro-4-(2-oxo-1,2-dihydropyridin-4-yl)phenoxy)methyl)piperidine-1-carboxylate; tert-butyl 4-((2,6-difluoro-4-(1-methyl-2-oxo-1,2-dihydropyridin-4-yl)phenoxy)methyl)piperidine-1-carboxylate; 2-(4-((2,6-difluoro-4-(2-methyl-6-(1H-1,2,4-triazol-1-yl)pyridin-3-yl)phenoxy)methyl)piperidin-1-yl)-5-ethylpyrimidine; 2-(4-((2,6-difluoro-4-(2-methyl-6-(methylsulfonyl)pyridin-3-yl)phenoxy)methyl)piperidin-1-yl)-5-ethylpyrimidine; 5-(4′-((1-(5-ethylpyrimidin-2-yl)piperidin-4-yl)methoxy)-3′,5′-difluorobiphenyl-4-yl)oxazole; 2-(4-((3,5-difluoro-4′-(1H-pyrazol-3-yl)biphenyl-4-yloxy)methyl)piperidin-1-yl)-5-ethylpyrimidine; 1-(4′-((1-(5-ethylpyrimidin-2-yl)piperidin-4-yl)methoxy)-3′,5′-difluorobiphenyl-4-yl)-N-methylmethanamine; N-((4′-((1-(5-ethylpyrimidin-2-yl)piperidin-4-yl)methoxy)-3′,5′-difluorobiphenyl-4-yl)methyl)-2-methylpropan-2-amine; 44(4′-((1-(5-ethylpyrimidin-2-yl)piperidin-4-yl)methoxy)-3′,5′-difluorobiphenyl-4-yl)methyl)morpholino; 2-(4-((4′-((1H-imidazol-1-yl)methyl)-3,5-difluorobiphenyl-4-yloxy)methyl)piperidin-1-yl)-5-ethylpyrimidine; 2-(4-((4′-((2H-tetrazol-2-yl)methyl)-3,5-difluorobiphenyl-4-yloxy)methyl)piperidin-1-yl)-5-ethylpyrimidine; 2-(4-((4′-((1H-tetrazol-1-yl)methyl)-3,5-difluorobiphenyl-4-yloxy)methyl)piperidin-1-yl)-5-ethylpyrimidine; 5-(4-((1-(5-ethylpyrimidin-2-yl)piperidin-4-yl)methoxy)-3,5-difluorophenyl)picolinamide; 5-(4-((1-(5-ethylpyrimidin-2-yl)piperidin-4-yl)methoxy)-3,5-difluorophenyl)-N-methylpicolinamide; 5-(4-((1-(5-ethylpyrimidin-2-yl)piperidin-4-yl)methoxy)-3,5-difluorophenyl)-N,N-dimethylpicolinamide; 1-methylcyclopropyl 4-((2,6-difluoro-4-(2-(piperazine-1-carbonyl)pyrimidin-5-yl)phenoxy)methyl)piperidine-1-carboxylate; 1-methylcyclopropyl 4-((4-(2-(dimethylcarbamoyl)pyrimidin-5-yl)-2,6-difluorophenoxy)methyl)piperidine-1-carboxylate; 1-methylcyclopropyl 4-((2,6-difluoro-4-(2-(morpholine-4-carbonyl)pyrimidin-5-yl)phenoxy)methyl)piperidine-1-carboxylate; 1-methylcyclopropyl 4-((2,6-difluoro-4-(2-(2-methoxyethylcarbamoyl)pyrimidin-5-yl)phenoxy)methyl)piperidine-1-carboxylate; 1-methylcyclopropyl 4-((2,6-difluoro-4-(2-oxo-2,3-dihydrooxazolo[4,5-b]pyridin-6-yl)phenoxy)methyl)piperidine-1-carboxylate; 1-methylcyclopropyl 4-((2,6-difluoro-4-(2-(2-hydroxyethylcarbamoyl)pyrimidin-5-yl)phenoxy)methyl)piperidine-1-carboxylate; and 1-methylcyclopropyl 4-((2,6-difluoro-4-(2-(3-hydroxypropylcarbamoyl)pyrimidin-5-yl)phenoxy)methyl)piperidine-1-carboxylate, or any of the compounds disclosed in WO 2010/006191, which is incorporated herein by reference in its entirety.

[0240] In embodiments wherein Y comprises a structure of Formula J, Y is conjugated to L (e.g. when L is a linking group) or Q (e.g. when L is a bond) at any position of Formula J that is capable of reacting with Q or L. One skilled in the art could readily determine the position of conjugation on Formula J and means of conjugation of Formula J to Q or L in view of general knowledge and the disclosure provided herein. In some embodiments, Formula J is conjugated to L or Q at any of position on Formula J.

[0241] Other examples of ligands that act at GPR119 are described in Overton et al., Cell Metabolism 3:167-175 (2006); Overton et al., British Journal of Pharmacology 153:S76-S81 (2008), and WO 2010/006191, each and all of which are incorporated herein by reference for each of its disclosures of GPR119 ligands.

GPCR Ligand that Acts on GPR120

[0242] In some embodiments of the invention, Y acts at GPR120. In some embodiments, Y can have any structure that permits or promotes agonist activity upon binding to GPR120, while in other embodiments Y is an antagonist of GPR120.

[0243] In some embodiments, Y acts at GPR120 and is an unsaturated free fatty acid or derivative thereof with cis or trans stereochemistry, as shown in Formula B:

[chemical structure]

wherein n is 4-26 and each R⁵, when present, are each independently a moiety that permits or promotes agonist or antagonist activity upon binding of the compound of Formula B to GPR120. In some embodiments, Y acts at GPR120 and comprises a structure of Formula B, wherein n is 4-26 and each R⁵, when present, is independently hydrogen, C₁-C₇ alkyl or halogen. Nonlimiting examples of Y is these embodiments include: mead acid, myristoleic acid, palmitoleic acid, sapienic acid, oleic acid, linoleic acid, α-linolenic acid, elaidic acid, petroselinic acid, arachidonic acid, dihydroxyeicosatetraenoic acid (DiHETE), octadecynoic acid, eicosatriynoic acid, eicosadienoic acid, eicosatrienoic acid, eicosapentaenoic acid, erucic acid, dihomolinolenic acid, docosatrienoic acid, docosapentaenoic acid, docosahexaenoic acid, and adrenic acid.

[0244] In embodiments wherein Y comprises a structure of Formula B, Y is conjugated to L (e.g. when L is a linking group) or Q (e.g. when L is a bond) at any position of Formula B that is capable of reacting with Q or L. One skilled in the art could readily determine the position of conjugation on Formula B and means of conjugation of Formula B to Q or L in view of general knowledge and the disclosure provided herein. In some embodiments, Formula B is conjugated to L or Q at any position on Formula B. In some embodiments, Formula B is conjugated to L or Q through the terminal carboxylic acid moiety.

[0245] In some embodiments, Y acts at GPR120 and is grifolic acid or a derivative thereof, as shown in Formula E:

[chemical structure]

wherein each R⁹ is independently a functional group that permits or promotes agonist or antagonist activity upon binding of the compound of Formula E to GPR120. In some embodiments, Y acts at GPR120 and comprises a structure of Formula E, wherein each R⁹ is independently hydrogen, OH, or O(C₁-C₈ alkyl). Nonlimiting examples of Y in these embodiments include grifolic acid and grifolic acid methyl ether, shown below:

[chemical structure]

and derivatives thereof.

[0246] In embodiments wherein Y comprises a structure of Formula E, Y is conjugated to L (e.g. when L is a linking group) or Q (e.g. when L is a bond) at any position of Formula E that is capable of reacting with Q or L. One skilled in the art could readily determine the position of conjugation on Formula E and means of conjugation of Formula E to Q or L in view of general knowledge and the disclosure provided herein. In some embodiments, Formula E is conjugated to L or Q at any position on Formula E. In some embodiments, Formula E is conjugated to L or Q through a carboxylic acid or hydroxyl moiety.

[0247] In some embodiments, Y is a small molecule having a molecular weight of up to about 5000 daltons, or up to about 2000 daltons, or up to about 1000 daltons, or up to about 500 daltons that permits or promotes agonist or antagonist activity at GPR120. In some embodiments, Y is 1000 daltons or less. For example Y acts at GPR120 and is GW9508, as shown below:

[chemical structure]

[0248] In the embodiments wherein Y is a GPCR ligand of low molecular weight, Y is conjugated to L (e.g. when L is a linking group) or Q (e.g. when L is a bond) at any position of Y that is capable of reacting with Q or L. One skilled in the art could readily determine the position of conjugation on Y and means of conjugation of Y to Q or L in view of general knowledge and the disclosure provided herein. In some embodiments, Y is conjugated to L or Q through any position of Y.

[0249] Other examples of ligands that act at GPR120 are described in; Briscoe et al., Br. J. Pharmacol. 148:619-628 (2006); Hara et al., Mol. Pharmacol. 75:85-91 (2009); and Hirasawa et al., Biol. Pharm. Bull. 31:1847-1851 (2008), each and all of which are incorporated herein by reference for each of their disclosures of GPR120 ligands.

### Modification of the GPCR Ligand (Y)

[0250] In some embodiments, the GPCR ligand is derivatized or otherwise chemically modified to comprise a reactive functional group that is capable of reacting with the glucagon superfamily peptide (Q) or the linking group (L). In the embodiments described herein, Y is derivatized at any position of Y that is capable of reacting with Q or L. The position of derivatization on Y is apparent to one skilled in the art and depends on the type of GPCR ligand used and the activity that is desired. In some embodiments, Y is derivatized at any of positions 1, 2, 3, 4, 5, 6, 7, 8, 9, 10, 11, 12, 13, 14, 15, 16, 17, 18, 19, 20, 21, 22, 23, 24, or 25. Other positions of derivatization can be as previously described herein

[0251] The GPCR ligand can be derivatized using any agent known to one skilled in the art or described herein (e.g. see The Linking Group section and the Chemical Modification of Q and/or Y subsection). For example, estradiol can be derivatized with succinic acid, succinic anhydride, benzoic acid, ethyl 2-bromoacetate, or iodoacetic acid to form the below derivatives of estradiol that are capable of conjugating to Q or L.

[chemical structure]

[0252] Similarly, any of the aforementioned GPCR ligands can be derivatized by methods known in the art. Additionally, certain derivatized ligands are commercially available and can be purchased from chemical companies such as Sigma-Aldrich.

### The Glucagon Superfamily Peptide (Q)

[0253] In the Q-L-Y conjugates described herein, Q is a glucagon superfamily peptide. A glucagon superfamily peptide refers to a group of peptides related in structure in their N-terminal and/or C-terminal regions (see, for example, Sherwood et al., Endocrine Reviews 21: 619-670 (2000)). It is believed that the C-terminus generally functions in receptor binding and the N-terminus generally functions in receptor signaling. A few amino acids in the N-terminal and C-terminal regions are highly conserved among members of the glucagon superfamily. Some of these conserved amino acids include His1, Gly4, Phe6, Phe22, Val23, Trp25 and Leu26, with amino acids at these positions showing identity, conservative substitutions or similarity in the structure of their amino acid side chains.

[0254] Glucagon superfamily peptides include glucagon related peptides, Growth Hormone Releasing Hormone (GHRH; SEQ ID NO: 1619), vasoactive intestinal peptide (VIP; SEQ ID NO: 1620), pituitary adenylate cyclase-activating polypeptide 27 (PACAP-27; SEQ ID NO: 1621), peptide histidine isoleucine (PHI; SEQ ID NO: 1542), peptide histidine methionine (PHM; SEQ ID NO: 1622), secretin (SEQ ID NO: 1623), and/or analogs, derivatives or conjugates thereof. In some embodiments, Q comprises an amino acid sequence of native glucagon, native exendin-4, native GLP-1(7-37), native GLP-2, native GHRH, native VIP, native PACAP-27, native PHM, native oxyntomodulin, native secretin, or native GIP with up to 1, 2, 3, 4, 5, 6, 7, 8, 9 or 10 amino acid modifications.

[0255] In some aspects of this invention, Q is a glucagon related peptide such as, for example, glucagon (SEQ ID NO: 1601), oxyntomodulin (SEQ ID NO: 1606), exendin-4 (SEQ ID NO: 1618), glucagon-like peptide-1 (GLP-1) (amino acids 7-36 provided as SEQ ID NO: 1603; amino acids 7-37 are provided as SEQ ID NO: 1604), glucagon-like peptide-2 (GLP-2, SEQ ID NO: 1608), gastric inhibitory peptide (GIP, SEQ ID NO: 1607) or analogs, derivatives and conjugates thereof. A glucagon related peptide has biological activity (as an agonist or antagonist) at any one or more of the glucagon, GLP-1, GLP-2, and GIP receptors and comprise an amino acid sequence that shares at least 20% sequence identity (e.g., 25%, 30%, 35%, 40%, 45%, 50%, 55%, 60%, 65%, 70%, 75%, 80%, 85%, 90%, 95%) with at least one of native glucagon, native oxyntomodulin, native exendin-4, native GLP-1(7-37), native GLP-2, or native GIP over the length of the peptide (or over the positions which correspond to glucagon, see e.g. FIG. 1).

[0256] It is understood that all possible activity subsets of glucagon related peptides are contemplated, e.g. peptides which have biological activity (as agonists or antagonists) at any one or more of the glucagon or GLP-1 or GIP receptors, together with all possible subsets of sequence identity to each listed native peptide, e.g., comprise an amino acid sequence that shares at least 20%, 25%, 30%, 35%, 40%, 45%, 50%, 55%, 60%, 65%, 70%, 75%, 80%, 85%, 90%, or 95% sequence identity with native GLP-1 over the length of native GLP-1. In some embodiments of the invention, the glucagon related peptide is a peptide having glucagon receptor agonist activity, GLP-1 receptor agonist activity, GIP receptor agonist activity, glucagon receptor/GLP-1 receptor co-agonist activity, glucagon receptor/GIP receptor co-agonist activity, GLP-1 receptor/GIP receptor co-agonist activity, glucagon receptor/GLP-1 receptor/GIP receptor tri-agonist activity, glucagon receptor antagonist activity, or glucagon receptor antagonist/GLP-1 receptor agonist activity. In some embodiments, the peptide retains an alpha-helix conformation in the C-terminal half of the molecule. In some embodiments, the peptide retains positions involved in receptor interaction or signaling, e.g. position 3 of glucagon, or position 7, 10, 12, 13, 15 or 17 of GLP-1(7-37). Accordingly, the glucagon related peptide can be a peptide of Class 1, Class 2, Class 3, Class 4, and/or Class 5, each of which is further described herein.

[0257] Q may also be any of the glucagon superfamily peptides that are known in the art, some of which are disclosed herein by way of nonlimiting examples. A variety of GLP-1 analogs are known in the art and are a glucagon-related peptide according to the current invention, see, e.g., WO 2008023050, WO 2007030519, WO 2005058954, WO 2003011892, WO 2007046834, WO 2006134340, WO 2006124529, WO 2004022004, WO 2003018516, WO 2007124461 each incorporated herein by reference in its entirety for each of its sequence or formula disclosures of GLP-1 analogs or derivatives. In any of the embodiments, Q can be a glucagon related peptide disclosed in WO 2007/056362, WO 2008/086086, WO 2009/155527, WO 2008/101017, WO 2009/155258, WO 2009/058662, WO 2009/058734, WO 2009/099763, WO 2010/011439, PCT Patent Application No. US09/68745, and U.S. Patent Application No. 61/187,578 each incorporated herein by reference in its entirety. In certain embodiments, Q is a Class 1, Class 2, Class 3, Class 4, or Class 5 glucagon related peptide as detailed herein. In any of the embodiments described herein, Q is any of SEQ ID NOs: 1-760, 801-919, 1001-1275, 1301-1371, 1401-1518, 1601-1650.

### Activity of the Glucagon Superfamily Peptide (Q)

### Activity at the Glucagon Receptor

[0258] In some embodiments, Q exhibits an EC₅₀ for glucagon receptor activation (or an IC₅₀ for glucagon receptor antagonism) of about 10 mM or less, or about 1 mM (1000 μM) or less (e.g., about 750 μM or less, about 500 μM or less, about 250 μM or less, about 100 μM or less, about 75 μM or less, about 50 μM or less, about 25 μM or less, about 10 μM or less, about 7.5 μM or less, about 6 μM or less, about 5 μM or less, about 4 μM or less, about 3 μM or less, about 2 μM or less or about 1 μM or less). In some embodiments, Q exhibits an EC₅₀ or IC₅₀ at the glucagon receptor of about 1000 nM or less (e.g., about 750 nM or less, about 500 nM or less, about 250 nM or less, about 100 nM or less, about 75 nM or less, about 50 nM or less, about 25 nM or less, about 10 nM or less, about 7.5 nM or less, about 6 nM or less, about 5 nM or less, about 4 nM or less, about 3 nM or less, about 2 nM or less or about 1 nM or less). In some embodiments, Q has an EC₅₀ or IC₅₀ at the glucagon receptor which is in the picomolar range. Accordingly, in some embodiments, Q exhibits an EC₅₀ or IC₅₀ at the glucagon receptor of about 1000 pM or less (e.g., about 750 pM or less, about 500 pM or less, about 250 pM or less, about 100 pM or less, about 75 pM or less, about 50 pM or less, about 25 pM or less, about 10 pM or less, about 7.5 pM or less, about 6 pM or less, about 5 pM or less, about 4 pM or less, about 3 pM or less, about 2 pM or less or about 1 pM or less).

[0259] In some embodiments, Q exhibits an EC₅₀ or IC₅₀ at the glucagon receptor that is about 0.001 pM or more, about 0.01 pM or more, or about 0.1 pM or more. Glucagon receptor activation (glucagon receptor activity) can be measured by in vitro assays measuring cAMP induction in HEK293 cells over-expressing the glucagon receptor, e.g., assaying HEK293 cells co-transfected with DNA encoding the glucagon receptor and a luciferase gene linked to cAMP responsive element as described in Example 2.

[0260] In some embodiments, Q exhibits about 0.001% or more, about 0.01% or more, about 0.1% or more, about 0.5% or more, about 1% or more, about 5% or more, about 10% or more, about 20% or more, about 30% or more, about 40% or more, about 50% or more, about 60% or more, about 75% or more, about 100% or more, about 125% or more, about 150% or more, about 175% or more, about 200% or more, about 250% or more, about 300% or more, about 350% or more, about 400% or more, about 450% or more, or about 500% or higher activity at the glucagon receptor relative to native glucagon (glucagon potency). In some embodiments, Q exhibits about 5000% or less or about 10,000% or less activity at the glucagon receptor relative to native glucagon. The activity of Q at a receptor relative to a native ligand of the receptor is calculated as the inverse ratio of EC₅₀s for Q versus the native ligand.

[0261] In some embodiments, Q exhibits substantial activity (potency) at only the glucagon receptor and little to no activity at the GLP-1 receptor or the GIP receptor. In some embodiments, Q is considered as a “pure glucagon receptor agonist” or is not considered as a “glucagon/GLP-1 receptor co-agonist” or a “glucagon/GIP receptor co-agonist.” In some embodiments Q exhibits any of the levels of activity or potency at the glucagon receptor described herein but has substantially less activity (potency) at the GLP-1 receptor or the GIP receptor. In some embodiments, Q exhibits an EC₅₀ at the GLP-1 receptor which is 100-fold or greater than the EC₅₀ at the glucagon receptor. In some embodiments, Q exhibits an EC₅₀ at the GIP receptor which is 100-fold or greater than the EC₅₀ at the glucagon receptor.

### Activity at the GLP-1 Receptor

[0262] In some embodiments, Q exhibits an EC₅₀ for GLP-1 receptor activation (or an IC₅₀ for GLP-1 receptor antagonism) of about 10 mM or less, or about 1 mM (1000 μM) or less (e.g., about 750 μM or less, about 500 μM or less, about 250 μM or less, about 100 μM or less, about 75 μM or less, about 50 μM or less, about 25 μM or less, about 10 μM or less, about 7.5 μM or less, about 6 μM or less, about 5 μM or less, about 4 μM or less, about 3 μM or less, about 2 μM or less or about 1 μM or less). In some embodiments, Q exhibits an EC₅₀ or IC₅₀ for GLP-1 receptor activation of about 1000 nM or less (e.g., about 750 nM or less, about 500 nM or less, about 250 nM or less, about 100 nM or less, about 75 nM or less, about 50 nM or less, about 25 nM or less, about 10 nM or less, about 7.5 nM or less, about 6 nM or less, about 5 nM or less, about 4 nM or less, about 3 nM or less, about 2 nM or less or about 1 nM or less). In some embodiments, Q has an EC₅₀ or IC₅₀ at the GLP-1 receptor which is in the picomolar range. Accordingly, in some embodiments, Q exhibits an EC₅₀ or IC₅₀ for GLP-1 receptor activation of about 1000 pM or less (e.g., about 750 pM or less, about 500 pM or less, about 250 pM or less, about 100 pM or less, about 75 pM or less, about 50 pM or less, about 25 pM or less, about 10 pM or less, about 7.5 pM or less, about 6 pM or less, about 5 pM or less, about 4 pM or less, about 3 pM or less, about 2 pM or less or about 1 pM or less).

[0263] In some embodiments, Q exhibits an EC₅₀ or IC₅₀ at the GLP-1 receptor that is about 0.001 pM or more, about 0.01 pM or more, or about 0.1 pM or more. GLP-1 receptor activation (GLP-1 receptor activity) can be measured by in vitro assays measuring cAMP induction in HEK293 cells over-expressing the GLP-1 receptor, e.g., assaying HEK293 cells co-transfected with DNA encoding the GLP-1 receptor and a luciferase gene linked to cAMP responsive element as described in Example 2.

[0264] In some embodiments, Q exhibits about 0.001% or more, about 0.01% or more, about 0.1% or more, about 0.5% or more, about 1% or more, about 5% or more, about 10% or more, about 20% or more, about 30% or more, about 40% or more, about 50% or more, about 60% or more, about 75% or more, about 100% or more, about 125% or more, about 150% or more, about 175% or more, about 200% or more, about 250% or more, about 300% or more, about 350% or more, about 400% or more, about 450% or more, or about 500% or higher activity at the GLP-1 receptor relative to native GLP-1 (GLP-1 potency). In some embodiments, Q exhibits about 5000% or less or about 10,000% or less activity at the GLP-1 receptor relative to native GLP-1 (GLP-1 potency).

[0265] In some embodiments, Q exhibit substantial activity (potency) at only the GLP-1 receptor and little to no activity at the glucagon receptor or the GIP receptor. In some embodiments, Q is considered as a “pure GLP-1 receptor agonist” or is not considered as a “glucagon/GLP-1 receptor co-agonist” or a “GLP-1/GIP co-agonist.” In some embodiments Q exhibits any of the levels of activity or potency at the GLP-1 receptor described herein but have substantially less activity (potency) at the glucagon receptor or the GIP receptor. In some embodiments, Q exhibits an EC₅₀ at the glucagon receptor which is 100-fold or greater than the EC₅₀ at the GLP-1 receptor. In some embodiments, Q exhibits an EC₅₀ at the GIP receptor which is 100-fold or greater than the EC₅₀ at the GLP-1 receptor.

### Activity at the GIP Receptor

[0266] In some embodiments, Q exhibits an EC₅₀ for GIP receptor activation (or an IC₅₀ for GIP receptor antagonism) of about 10 mM or less, or about 1 mM (1000 μM) or less (e.g., about 750 μM or less, about 500 μM or less, about 250 μM or less, about 100 μM or less, about 75 μM or less, about 50 μM or less, about 25 μM or less, about 10 μM or less, about 7.5 μM or less, about 6 μM or less, about 5 μM or less, about 4 μM or less, about 3 μM or less, about 2 μM or less or about 1 μM or less). In some embodiments, the EC₅₀ or IC₅₀ of Q at the GIP receptor is less than 1000 nM, less than 900 nM, less than 800 nM, less than 700 nM, less than 600 nM, less than 500 nM, less than 400 nM, less than 300 nM, or less than 200 nM. In some embodiments, the EC₅₀ or IC₅₀ of Q at the GIP receptor is about 100 nM or less, e.g., about 75 nM or less, about 50 nM or less, about 25 nM or less, about 10 nM or less, about 8 nM or less, about 6 nM or less, about 5 nM or less, about 4 nM or less, about 3 nM or less, about 2 nM or less, or about 1 nM or less. In some embodiments, the Q exhibits an EC₅₀ or IC₅₀ for GIP receptor activation which is in the picomolar range. In exemplary embodiments, the EC₅₀ or IC₅₀ of Q at the GIP receptor is less than 1000 pM, less than 900 pM, less than 800 pM, less than 700 pM, less than 600 pM, less than 500 pM, less than 400 pM, less than 300 pM, less than 200 pM. In some embodiments, the EC₅₀ or IC₅₀ of Q at the GIP receptor is about 100 pM or less, e.g., about 75 pM or less, about 50 pM or less, about 25 pM or less, about 10 pM or less, about 8 pM or less, about 6 pM or less, about 5 pM or less, about 4 pM or less, about 3 pM or less, about 2 pM or less, or about 1 pM or less. Receptor activation can be measured by in vitro assays measuring cAMP induction in HEK293 cells over-expressing the GIP receptor, e.g. assaying HEK293 cells co-transfected with DNA encoding the receptor and a luciferase gene linked to cAMP responsive element as described in Example 2.

[0267] In some embodiments of the present disclosures, Q exhibits at least or about 0.1% activity of native GIP at the GIP receptor. In exemplary embodiments, Q exhibits at least or about 0.2%, at least or about 0.3%, at least or about 0.4%, at least or about 0.5%, at least or about 0.6%, at least or about 0.7%, at least or about 0.8%, at least or about 0.9%, at least or about 1%, at least or about 5%, at least or about 10%, at least or about 20%, at least or about 30%, at least or about 40%, at least or about 50%, at least or about 60%, at least or about 70%, at least or about 75%, at least or about 80%, at least or about 90%, at least or about 95%, or at least or about 100% of the activity of native GIP at the GIP receptor.

[0268] In some embodiments of the present disclosures, Q exhibits activity at the GIP receptor which is greater than that of native GIP. In exemplary embodiments, Q exhibits at least or about 101%, at least or about 105%, at least or about 110%, at least or about 125%, at least or about 150%, at least or about 175% at least or about 200%, at least or about 300%, at least or about 400%, at least or about 500% or higher % of the activity of native GIP at the GIP receptor. In some embodiments, Q exhibits no more than 1000%, 10,000%, 100,000%, or 1,000,000% activity at the GIP receptor relative to native GIP. A peptide's activity at the GIP receptor relative to native GIP is calculated as the inverse ratio of EC50s for the GIP agonist peptide vs. native GIP.

[0269] In some embodiments, Q exhibits substantial activity (potency) at only the GIP receptor and little to no activity at the glucagon receptor or the GLP-1 receptor. In some embodiments, Q is considered as a “pure GIP receptor agonist” or is not considered as a “glucagon/GIP receptor co-agonist” or a “GLP-1/GIP co-agonist.” In some embodiments Q exhibits any of the levels of activity or potency at the GIP receptor described herein but has substantially less activity (potency) at the glucagon receptor or the GLP-1 receptor. In some embodiments, Q exhibits an EC₅₀ at the glucagon receptor which is 100-fold or greater than the EC₅₀ at the GIP receptor and an EC₅₀ at the GLP-1 receptor which is 100-fold or greater than the EC₅₀ at the GIP receptor.

### Activity at the GLP-1 Receptor and the Glucagon Receptor

[0270] In some embodiments, Q exhibits activity at both the GLP-1 receptor and glucagon receptor (“glucagon/GLP-1 receptor co-agonists”). In some embodiments, the activity (e.g., the EC₅₀ or the relative activity or potency) of Q at the glucagon receptor is within about 50-fold, about 40-fold, about 30-fold, about 20-fold, about 10-fold, or about 5 fold different (higher or lower) from its activity (e.g., the EC₅₀ or the relative activity or potency) at the GLP-1 receptor. In some embodiments, the glucagon potency of Q is within about 25-, about 20-, about 15-, about 10-, or about 5-fold different (higher or lower) from its GLP-1 potency.

[0271] In some embodiments, the ratio of the relative activity or the EC₅₀ or the potency of the Q at the glucagon receptor divided by the relative activity or the EC₅₀ or potency of Q at the GLP-1 receptor is less than, or is about, X, wherein X is selected from 100, 75, 60, 50, 40, 30, 20, 15, 10, or 5. In some embodiments, the ratio of the EC₅₀ or potency or relative activity of Q at the glucagon receptor divided by the EC₅₀ or potency or relative activity of Q at the GLP-1 receptor is about 1 less than 5 (e.g., about 4, about 3, about 2, about 1). In some embodiments, the ratio of the glucagon potency of Q compared to the GLP-1 potency of Q is less than, or is about, Z, wherein Z is selected from 100, 75, 60, 50, 40, 30, 20, 15, 10, and 5. In some embodiments, the ratio of the glucagon potency of Q compared to the GLP-1 potency of Q is less than 5 (e.g., about 4, about 3, about 2, about 1). In some embodiments, Q has an EC₅₀ at the glucagon receptor which is 2- to 10-fold (e.g., 2-fold, 3-fold, 4-fold, 5-fold, 6-fold, 7-fold, 8-fold, 9-fold, 10-fold) greater than the EC₅₀ at the GLP-1 receptor.

[0272] In some embodiments, the ratio of the relative activity or potency or the EC₅₀ of Q at the GLP-1 receptor divided by the relative activity or potency or the EC₅₀ of the glucagon analog at the glucagon receptor is less than, or is about, V, wherein V is selected from 100, 75, 60, 50, 40, 30, 20, 15, 10, or 5. In some embodiments, the ratio of the EC₅₀ or potency or relative activity of Q at the GLP-1 receptor divided by the EC₅₀ or potency or relative activity of Q at the glucagon receptor is less than 5 (e.g., about 4, about 3, about 2, about 1). In some embodiments, the ratio of the GLP-1 potency of Q compared to the glucagon potency of Q is less than, or is about, W, wherein W is selected from 100, 75, 60, 50, 40, 30, 20, 15, 10, and 5. In some embodiments, the ratio of the GLP-1 potency of Q compared to the glucagon potency of Q is less than 5 (e.g., about 4, about 3, about 2, about 1). In some embodiments, Q has an EC₅₀ at the GLP-1 receptor which is about 2- to about 10-fold (e.g., 2-fold, 3-fold, 4-fold, 5-fold, 6-fold, 7-fold, 8-fold, 9-fold, 10-fold) greater than the EC₅₀ at the glucagon receptor.

[0273] In some embodiments, Q exhibits at least 0.1% (e.g., about 0.5% or more, about 1% or more, about 5% or more, about 10% or more, or more) of the activity of native GLP-1 at the GLP-1 receptor (GLP-1 potency) and exhibits at least 0.1% (e.g., about 0.5% or more, about 1% or more, about 5% or more, about 10% or more, or more) of the activity of native glucagon at the glucagon receptor (glucagon potency).

[0274] Selectivity of Q for the glucagon receptor versus the GLP-1 receptor can be described as the relative ratio of glucagon/GLP-1 activity (Q's activity at the glucagon receptor relative to native glucagon, divided by the analog's activity at the GLP-1 receptor relative to native GLP-1). For example, a Q that exhibits 60% of the activity of native glucagon at the glucagon receptor and 60% of the activity of native GLP-1 at the GLP-1 receptor has a 1:1 ratio of glucagon/GLP-1 activity. Exemplary ratios of glucagon/GLP-1 activity include about 1:1, 1.5:1, 2:1, 3:1, 4:1, 5:1, 6:1, 7:1, 8:1, 9:1 or 10:1, or about 1:10, 1:9, 1:8, 1:7, 1:6, 1:5, 1:4, 1:3, 1:2, or 1:1.5. As an example, a glucagon/GLP-1 activity ratio of 10:1 indicates a 10-fold selectivity for the glucagon receptor versus the GLP-1 receptor. Similarly, a GLP-1/glucagon activity ratio of 10:1 indicates a 10-fold selectivity for the GLP-1 receptor versus the glucagon receptor.

[0275] In some embodiments, Q exhibits substantial activity (potency) at the glucagon receptor and GLP-1 receptor and little to no activity at the GIP receptor. In some embodiments Q exhibits any of the levels of activity or potency at the glucagon receptor and the GLP-1 receptor described herein but has substantially less activity (potency) at the GIP receptor. In some embodiments, Q exhibits an EC₅₀ at the GIP receptor which is 100-fold or greater than the EC₅₀ at the glucagon receptor and the EC₅₀ at the GLP-1 receptor.

### Activity at the GLP-1 Receptor and the GIP Receptor

[0276] In some embodiments, Q exhibits activity at both the GLP-1 receptor and GIP receptor (“GIP/GLP-1 receptor co-agonists”). In some embodiments, the activity (e.g., the EC₅₀ or the relative activity or potency) of Q at the GIP receptor is within about 50-fold, about 40-fold, about 30-fold, about 20-fold, about 10-fold, or about 5 fold different (higher or lower) from its activity (e.g., the EC₅₀ or the relative activity or potency) at the GLP-1 receptor. In some embodiments, the GIP potency of Q is within about 25-, about 20-, about 15-, about 10-, or about 5-fold different (higher or lower) from its GLP-1 potency.

[0277] In some embodiments, the ratio of the relative activity or the EC₅₀ or the potency of the Q at the GIP receptor divided by the relative activity or the EC₅₀ or potency of Q at the GLP-1 receptor is less than, or is about, X, wherein X is selected from 100, 75, 60, 50, 40, 30, 20, 15, 10, or 5. In some embodiments, the ratio of the EC₅₀ or potency or relative activity of Q at the GIP receptor divided by the EC₅₀ or potency or relative activity of Q at the GLP-1 receptor is about 1 less than 5 (e.g., about 4, about 3, about 2, about 1). In some embodiments, the ratio of the GIP potency of Q compared to the GLP-1 potency of Q is less than, or is about, Z, wherein Z is selected from 100, 75, 60, 50, 40, 30, 20, 15, 10, and 5. In some embodiments, the ratio of the GIP potency of Q compared to the GLP-1 potency of Q is less than 5 (e.g., about 4, about 3, about 2, about 1). In some embodiments, Q has an EC₅₀ at the GIP receptor which is 2- to 10-fold (e.g., 2-fold, 3-fold, 4-fold, 5-fold, 6-fold, 7-fold, 8-fold, 9-fold, 10-fold) greater than the EC₅₀ at the GLP-1 receptor.

[0278] In some embodiments, the ratio of the relative activity or potency or the EC₅₀ of Q at the GLP-1 receptor divided by the relative activity or potency or the EC₅₀ of Q at the GIP receptor is less than, or is about, V, wherein V is selected from 100, 75, 60, 50, 40, 30, 20, 15, 10, or 5. In some embodiments, the ratio of the EC₅₀ or potency or relative activity of Q at the GLP-1 receptor divided by the EC₅₀ or potency or relative activity of Q at the GIP receptor is less than 5 (e.g., about 4, about 3, about 2, about 1). In some embodiments, the ratio of the GLP-1 potency of Q compared to the GIP potency of Q is less than, or is about, W, wherein W is selected from 100, 75, 60, 50, 40, 30, 20, 15, 10, and 5. In some embodiments, the ratio of the GLP-1 potency of Q compared to the GIP potency of Q is less than 5 (e.g., about 4, about 3, about 2, about 1). In some embodiments, Q has an EC₅₀ at the GLP-1 receptor which is about 2- to about 10-fold (e.g., 2-fold, 3-fold, 4-fold, 5-fold, 6-fold, 7-fold, 8-fold, 9-fold, 10-fold) greater than the EC₅₀ at the GIP receptor.

[0279] In some embodiments, Q exhibits at least 0.1% (e.g., about 0.5% or more, about 1% or more, about 5% or more, about 10% or more, or more) of the activity of native GLP-1 at the GLP-1 receptor (GLP-1 potency) and exhibits at least 0.1% (e.g., about 0.5% or more, about 1% or more, about 5% or more, about 10% or more, or more) of the activity of native GIP at the GIP receptor (GIP potency).

[0280] Selectivity of Q for the GIP receptor versus the GLP-1 receptor can be described as the relative ratio of GIP/GLP-1 activity (Q's activity at the GIP receptor relative to native GIP, divided by the analog's activity at the GLP-1 receptor relative to native GLP-1). For example, a Q that exhibits 60% of the activity of native GIP at the GIP receptor and 60% of the activity of native GLP-1 at the GLP-1 receptor has a 1:1 ratio of GIP/GLP-1 activity. Exemplary ratios of GIP/GLP-1 activity include about 1:1, 1.5:1, 2:1, 3:1, 4:1, 5:1, 6:1, 7:1, 8:1, 9:1 or 10:1, or about 1:10, 1:9, 1:8, 1:7, 1:6, 1:5, 1:4, 1:3, 1:2, or 1:1.5. As an example, a GIP/GLP-1 activity ratio of 10:1 indicates a 10-fold selectivity for the GIP receptor versus the GLP-1 receptor. Similarly, a GLP-1/GIP activity ratio of 10:1 indicates a 10-fold selectivity for the GLP-1 receptor versus the GIP receptor.

### Activity at the Glucagon Receptor and the GIP Receptor

[0281] In some embodiments, Q exhibits activity at both the glucagon receptor and GIP receptor (“GIP/glucagon receptor co-agonists”). In some embodiments, the activity (e.g., the EC₅₀ or the relative activity or potency) of Q at the GIP receptor is within about 50-fold, about 40-fold, about 30-fold, about 20-fold, about 10-fold, or about 5 fold different (higher or lower) from its activity (e.g., the EC₅₀ or the relative activity or potency) at the glucagon receptor. In some embodiments, the GIP potency of Q is within about 25-, about 20-, about 15-, about 10-, or about 5-fold different (higher or lower) from its glucagon potency.

[0282] In some embodiments, the ratio of the relative activity or the EC₅₀ or the potency of the Q at the GIP receptor divided by the relative activity or the EC₅₀ or potency of Q at the glucagon receptor is less than, or is about, X, wherein X is selected from 100, 75, 60, 50, 40, 30, 20, 15, 10, or 5. In some embodiments, the ratio of the EC₅₀ or potency or relative activity of Q at the GIP receptor divided by the EC₅₀ or potency or relative activity of Q at the glucagon receptor is about 1 less than 5 (e.g., about 4, about 3, about 2, about 1). In some embodiments, the ratio of the GIP potency of Q compared to the glucagon potency of Q is less than, or is about, Z, wherein Z is selected from 100, 75, 60, 50, 40, 30, 20, 15, 10, and 5. In some embodiments, the ratio of the GIP potency of Q compared to the glucagon potency of Q is less than 5 (e.g., about 4, about 3, about 2, about 1). In some embodiments, Q has an EC₅₀ at the GIP receptor which is 2- to 10-fold (e.g., 2-fold, 3-fold, 4-fold, 5-fold, 6-fold, 7-fold, 8-fold, 9-fold, 10-fold) greater than the EC₅₀ at the glucagon receptor.

[0283] In some embodiments, the ratio of the relative activity or potency or the EC₅₀ of Q at the glucagon receptor divided by the relative activity or potency or the EC₅₀ of Q at the GIP receptor is less than, or is about, V, wherein V is selected from 100, 75, 60, 50, 40, 30, 20, 15, 10, or 5. In some embodiments, the ratio of the EC₅₀ or potency or relative activity of Q at the glucagon receptor divided by the EC₅₀ or potency or relative activity of Q at the GIP receptor is less than 5 (e.g., about 4, about 3, about 2, about 1). In some embodiments, the ratio of the glucagon potency of Q compared to the GIP potency of Q is less than, or is about, W, wherein W is selected from 100, 75, 60, 50, 40, 30, 20, 15, 10, and 5. In some embodiments, the ratio of the glucagon potency of Q compared to the GIP potency of Q is less than 5 (e.g., about 4, about 3, about 2, about 1). In some embodiments, Q has an EC₅₀ at the glucagon receptor which is about 2- to about 10-fold (e.g., 2-fold, 3-fold, 4-fold, 5-fold, 6-fold, 7-fold, 8-fold, 9-fold, 10-fold) greater than the EC₅₀ at the GIP receptor.

[0284] In some embodiments, Q exhibits at least 0.1% (e.g., about 0.5% or more, about 1% or more, about 5% or more, about 10% or more, or more) of the activity of native glucagon at the glucagon receptor (glucagon potency) and exhibits at least 0.1% (e.g., about 0.5% or more, about 1% or more, about 5% or more, about 10% or more, or more) of the activity of native GIP at the GIP receptor (GIP potency).

[0285] Selectivity of Q for the GIP receptor versus the glucagon receptor can be described as the relative ratio of GIP/glucagon activity (Q's activity at the GIP receptor relative to native GIP, divided by the analog's activity at the glucagon receptor relative to native glucagon). For example, a Q that exhibits 60% of the activity of native GIP at the GIP receptor and 60% of the activity of native glucagon at the glucagon receptor has a 1:1 ratio of GIP/glucagon activity. Exemplary ratios of GIP/glucagon activity include about 1:1, 1.5:1, 2:1, 3:1, 4:1, 5:1, 6:1, 7:1, 8:1, 9:1 or 10:1, or about 1:10, 1:9, 1:8, 1:7, 1:6, 1:5, 1:4, 1:3, 1:2, or 1:1.5. As an example, a GIP/glucagon activity ratio of 10:1 indicates a 10-fold selectivity for the GIP receptor versus the glucagon receptor. Similarly, a glucagon/GIP activity ratio of 10:1 indicates a 10-fold selectivity for the glucagon receptor versus the GIP receptor.

### Activity at the Glucagon Receptor, the GLP-1 Receptor, and the GIP Receptor

[0286] In some embodiments, Q exhibits activity at all three of the glucagon receptor, the GLP-1 receptor, and the GIP receptor (“glucagon/GLP-1/GIP receptor tri-agonists”). In some embodiments, the activity (e.g., the EC₅₀ or the relative activity or potency) of Q at the glucagon receptor is within about 100-fold, about 75-fold, about 60-fold, 50-fold, about 40-fold, about 30-fold, about 20-fold, about 10-fold, or about 5 fold different (higher or lower) from its activity (e.g., the EC₅₀ or the relative activity or potency) at both the GLP-1 receptor and the GIP receptor. In some embodiments, the activity (e.g., the EC₅₀ or the relative activity or potency) of Q at the GLP-1 receptor is within about 100-fold, about 75-fold, about 60-fold, 50-fold, about 40-fold, about 30-fold, about 20-fold, about 10-fold, or about 5 fold different (higher or lower) from its activity (e.g., the EC₅₀ or the relative activity or potency) at both the glucagon receptor and the GIP receptor. In some embodiments, the activity (e.g., the EC₅₀ or the relative activity or potency) of Q at the GIP receptor is within about 100-fold, about 75-fold, about 60-fold, 50-fold, about 40-fold, about 30-fold, about 20-fold, about 10-fold, or about 5 fold different (higher or lower) from its activity (e.g., the EC₅₀ or the relative activity or potency) at both the glucagon receptor and the GLP-1 receptor. This fold difference can be alternatively expressed as ratios of glucagon/GLP-1, or GLP-1/GIP, or glucagon/GLP-1 as above.

### Structure of the Glucagon Superfamily Peptide (Q)

[0287] The glucagon superfamily peptide (Q) described herein can comprise an amino acid sequence which is based on the amino acid sequence of native human glucagon (SEQ ID NO: 1601), native human GLP-1 (SEQ ID NOs: 1603 or 1604), or native human GIP (SEQ ID NO: 1607).

### Based on Native Human Glucagon

[0288] In some aspects of the invention, the glucagon superfamily peptide (Q) comprises an amino acid sequence that is based on the amino acid sequence of native human glucagon (SEQ ID NO: 1601). In some aspects, Q comprises a modified amino acid sequence of SEQ ID NO: 1601 comprising 1, 2, 3, 4, 5, 6, 7, 8, 9, 10, 11, 12, 13, 14, 15, and in some instances, 16 or more (e.g., 17, 18, 19, 20, 21, 22, 23, 24, 25, etc.), amino acid modifications. In some embodiments, Q comprises a total of 1, up to 2, up to 3, up to 4, up to 5, up to 6, up to 7, up to 8, up to 9, or up to 10 amino acid modifications relative to the native human glucagon sequence (SEQ ID NO: 1601). In some embodiments, the modifications are any of those described herein, e.g., acylation, alkylation, pegylation, truncation at C-terminus, substitution of the amino acid at one or more of positions 1, 2, 3, 7, 10, 12, 15, 16, 17, 18, 19, 20, 21, 23, 24, 27, 28, and 29.

[0289] In some embodiments, Q comprises an amino acid sequence which has at least 25% sequence identity to the amino acid sequence of native human glucagon (SEQ ID NO: 1601). In some embodiments, Q comprises an amino acid sequence which is at least 30%, at least 40%, at least 50%, at least 60%, at least 70%, at least 80%, at least 85%, at least 90% or has greater than 90% sequence identity to SEQ ID NO: 1601. In some embodiments, the amino acid sequence of Q, which has the above-referenced % sequence identity is the full-length amino acid sequence of Q. In some embodiments, the amino acid sequence of Q which has the above-referenced % sequence identity is only a portion of the amino acid sequence of Q. In some embodiments, Q comprises an amino acid sequence which has about A % or greater sequence identity to a reference amino acid sequence of at least 5 contiguous amino acids (e.g., at least 6, at least 7, at least 8, at least 9, at least 10 amino acids) of SEQ ID NO: 1601, wherein the reference amino acid sequence begins with the amino acid at position C of SEQ ID NO: 1601 and ends with the amino acid at position D of SEQ ID NO: 1601, wherein A is 25, 30, 35, 40, 45, 50, 55, 60, 65, 70, 75, 80, 85, 90, 91, 92, 93, 94, 95, 96, 97, 98, 99; C is 1, 2, 3, 4, 5, 6, 7, 8, 9, 10, 11, 12, 13, 14, 15, 16, 17, 18, 19, 20, 21, 22, 23, 24, 25, 26, 27, or 28 and D is 5, 6, 7, 8, 9, 10, 11, 12, 13, 14, 15, 16, 17, 18, 19, 20, 21, 22, 23, 24, 25, 26, 27, 28 or 29. Any and all possible combinations of the foregoing parameters are envisioned, including but not limited to, e.g., wherein A is 90% and C and D are 1 and 27, or 6 and 27, or 8 and 27, or 10 and 27, or 12 and 27, or 16 and 27.

### Based on Native Human GLP-1

[0290] In some aspects of the invention, the glucagon superfamily peptide (Q) comprises an amino acid sequence that is based on the amino acid sequence of native human GLP-1 (SEQ ID NO: 1603). In some aspects, Q comprises a modified amino acid sequence of SEQ ID NO: 1603 comprising 1, 2, 3, 4, 5, 6, 7, 8, 9, 10, 11, 12, 13, 14, 15, and in some instances, 16 or more (e.g., 17, 18, 19, 20, 21, 22, 23, 24, 25, etc.), amino acid modifications. In some embodiments, Q comprises a total of 1, up to 2, up to 3, up to 4, up to 5, up to 6, up to 7, up to 8, up to 9, or up to 10 amino acid modifications relative to the native human GLP-1 sequence (SEQ ID NO: 1603). In some embodiments, the modifications are any of those described herein, e.g., acylation, alkylation, pegylation, truncation at C-terminus, substitution of the amino acid at one or more of positions 1, 2, 3, 7, 10, 12, 15, 16, 17, 18, 19, 20, 21, 23, 24, 27, 28, and 29.

[0291] In some embodiments, Q comprises an amino acid sequence which has at least 25% sequence identity to the amino acid sequence of native human GLP-1 (SEQ ID NO: 1603). In some embodiments, Q comprises an amino acid sequence which is at least 30%, at least 40%, at least 50%, at least 60%, at least 70%, at least 80%, at least 85%, at least 90% or has greater than 90% sequence identity to SEQ ID NO: 1603. In some embodiments, the amino acid sequence of Q, which has the above-referenced % sequence identity is the full-length amino acid sequence of Q. In some embodiments, the amino acid sequence of Q which has the above-referenced % sequence identity is only a portion of the amino acid sequence of Q. In some embodiments, Q comprises an amino acid sequence which has about A % or greater sequence identity to a reference amino acid sequence of at least 5 contiguous amino acids (e.g., at least 6, at least 7, at least 8, at least 9, at least 10 amino acids) of SEQ ID NO: 1603, wherein the reference amino acid sequence begins with the amino acid at position C of SEQ ID NO: 1603 and ends with the amino acid at position D of SEQ ID NO: 1603, wherein A is 25, 30, 35, 40, 45, 50, 55, 60, 65, 70, 75, 80, 85, 90, 91, 92, 93, 94, 95, 96, 97, 98, 99; C is 1, 2, 3, 4, 5, 6, 7, 8, 9, 10, 11, 12, 13, 14, 15, 16, 17, 18, 19, 20, 21, 22, 23, 24, 25, 26, 27, or 28 and D is 5, 6, 7, 8, 9, 10, 11, 12, 13, 14, 15, 16, 17, 18, 19, 20, 21, 22, 23, 24, 25, 26, 27, 28 or 29. Any and all possible combinations of the foregoing parameters are envisioned, including but not limited to, e.g., wherein A is 90% and C and D are 1 and 27, or 6 and 27, or 8 and 27, or 10 and 27, or 12 and 27, or 16 and 27.

### Based on Native Human GIP

[0292] In some embodiments of the present disclosures, Q is an analog of native human GIP, the amino acid sequence of which is provided herein as SEQ ID NO: 1607. Accordingly, in some embodiments, Q comprises an amino acid sequence which is based on the amino acid sequence of SEQ ID NO: 1607 but is modified with 1, 2, 3, 4, 5, 6, 7, 8, 9, 10, 11, 12, 13, 14, 15, and in some instances, 16 or more (e.g., 17, 18, 19, 20, 21, 22, 23, 24, 25, etc.), amino acid modifications. In some embodiments, Q comprises a total of 1, up to 2, up to 3, up to 4, up to 5, up to 6, up to 7, up to 8, up to 9, or up to 10 amino acid modifications relative to the native human GIP sequence (SEQ ID NO: 1607). In some embodiments, the modifications are any of those described herein, e.g., acylation, alkylation, pegylation, truncation at C-terminus, substitution of the amino acid at one or more of positions 1, 2, 3, 7, 10, 12, 15, 16, 17, 18, 19, 20, 21, 23, 24, 27, 28, and 29. Exemplary GIP receptor agonists are known in the art. See, for example, Irwin et al., J Pharm and Expmt Ther 314(3): 1187-1194 (2005); Salhanick et al., Bioorg Med Chem Lett 15(18): 4114-4117 (2005); Green et al., Dibetes 7(5): 595-604 (2005); O'Harte et al., J Endocrinol 165(3): 639-648 (2000); O'Harte et al., Diabetologia 45(9): 1281-1291 (2002); Gault et al., Biochem J 367 (Pt3): 913-920 (2002); Gault et al., J Endocrin 176: 133-141 (2003); Irwin et al., Diabetes Obes Metab. 11(6): 603-610 (epub 2009).

[0293] In some embodiments, Q comprises an amino acid sequence which has at least 25% sequence identity to the amino acid sequence of native human GIP (SEQ ID NO: 1607). In some embodiments, Q comprises an amino acid sequence which is at least 30%, at least 40%, at least 50%, at least 60%, at least 70%, at least 80%, at least 85%, at least 90% or has greater than 90% sequence identity to SEQ ID NO: 1607. In some embodiments, the amino acid sequence of Q which has the above-referenced % sequence identity is the full-length amino acid sequence of Q. In some embodiments, the amino acid sequence of Q which has the above-referenced % sequence identity is only a portion of the amino acid sequence of Q. In some embodiments, Q comprises an amino acid sequence which has about A % or greater sequence identity to a reference amino acid sequence of at least 5 contiguous amino acids (e.g., at least 6, at least 7, at least 8, at least 9, at least 10 amino acids) of SEQ ID NO: 1607, wherein the reference amino acid sequence begins with the amino acid at position C of SEQ ID NO: 1607 and ends with the amino acid at position D of SEQ ID NO: 1607, wherein A is 25, 30, 35, 40, 45, 50, 55, 60, 65, 70, 75, 80, 85, 90, 91, 92, 93, 94, 95, 96, 97, 98, 99; C is 1, 2, 3, 4, 5, 6, 7, 8, 9, 10, 11, 12, 13, 14, 15, 16, 17, 18, 19, 20, 21, 22, 23, 24, 25, 26, 27, or 28 and D is 5, 6, 7, 8, 9, 10, 11, 12, 13, 14, 15, 16, 17, 18, 19, 20, 21, 22, 23, 24, 25, 26, 27, 28 or 29. Any and all possible combinations of the foregoing parameters are envisioned, including but not limited to, e.g., wherein A is 90% and C and D are 1 and 27, or 6 and 27, or 8 and 27, or 10 and 27, or 12 and 27, or 16 and 27.

### Modifications

[0294] When Q is a glucagon related peptide, Q can comprise the native glucagon amino acid sequence (SEQ ID NO: 1601) with modifications. In exemplary embodiments, the glucagon related peptide may comprise a total of 1, up to 2, up to 3, up to 4, up to 5, up to 6, up to 7, up to 8, up to 9, or up to 10 amino acid modifications relative to the native glucagon sequence, e.g. conservative or non-conservative substitutions. Modifications and substitutions described herein are, in certain aspects made at specific positions within Q wherein the numbering of the position corresponds to the numbering of glucagon (SEQ ID NO: 1601). In some embodiments 1, 2, 3, 4 or 5 non-conservative substitutions are carried out at any of positions 2, 5, 7, 10, 11, 12, 13, 14, 17, 18, 19, 20, 21, 24, 27, 28 or 29 and up to 5 further conservative substitutions are carried out at any of these positions. In some embodiments 1, 2, or 3 amino acid modifications are carried out within amino acids at positions 1-16, and 1, 2 or 3 amino acid modifications are carried out within amino acids at positions 17-26. In some embodiments, Q retains at least 22, 23, 24, 25, 26, 27 or 28 of the naturally occurring amino acids at the corresponding positions in native glucagon (e.g. have 1-7, 1-5 or 1-3 modifications relative to naturally occurring glucagon).

### DPP-IV Resistance

[0295] In some embodiments where Q is a glucagon related peptide, Q comprises a modification at position 1 or 2 to reduce susceptibility to cleavage by dipeptidyl peptidase IV (DPP-IV). More particularly, in some embodiments, position 1 of Q (e.g., selected from those in FIG. 1) is substituted with an amino acid selected from the group consisting of D-histidine, alpha, alpha-dimethyl imidiazole acetic acid (DMIA), N-methyl histidine, alpha-methyl histidine, imidazole acetic acid, desaminohistidine, hydroxyl-histidine, acetyl-histidine and homo-histidine. More particularly, in some embodiments, position 2 of Q is substituted with an amino acid selected from the group consisting of D-serine, D-alanine, valine, glycine, N-methyl serine, and aminoisobutyric acid. In some embodiments, position 2 of the glucagon related peptide is not D-serine.

### Glucagon Modification at Position 3

[0296] Glucagon related peptides of Classes 1 to 3 described herein may be modified at position 3 (according to the amino acid numbering of wild type glucagon) to maintain or increase activity at the glucagon receptor.

[0297] In some embodiments in which Q is a Class 1, Class 2, or Class 3 glucagon related peptide, maintained or enhanced activity at the glucagon receptor may be achieved by modifying the Gln at position 3 with a glutamine analog. For example, a Class 1, Class 2, or Class 3 glucagon related peptide comprising a glutamine analog at position 3 may exhibit about 5%, about 10%, about 20%, about 50%, or about 85% or greater the activity of native glucagon (SEQ ID NO: 1601) at the glucagon receptor. In some embodiments a Class 1, Class 2, or Class 3 glucagon related peptide comprising a glutamine analog at position 3 may exhibit about 20%, about 50%, about 75%, about 100%, about 200% or about 500% or greater the activity of a corresponding glucagon peptide having the same amino acid sequence as the peptide comprising the glutamine analog, except for the modified amino acid at position 3 at the glucagon receptor. In some embodiments, a Class 1, Class 2, or Class 3 glucagon related peptide comprising a glutamine analog at position 3 exhibits enhanced activity at the glucagon receptor, but the enhanced activity is no more than 1000%, 10,000%, 100,000%, or 1,000,000% of the activity of native glucagon or of a corresponding glucagon related peptide having the same amino acid sequence as the peptide comprising the glutamine analog, except for the modified amino acid at position 3.

[0298] In some embodiments, the glutamine analog is a naturally occurring or a non-naturally occurring amino acid comprising a side chain of Structure I, II or III:

[chemical structure]

wherein R¹ is C₀₋₃ alkyl or C₀₋₃ heteroalkyl; R² is NHR⁴ or C₁₋₃ alkyl; R³ is C₁₋₃ alkyl; R⁴ is H or C₁₋₃ alkyl; X is NH, O, or S; and Y is NHR⁴, SR³, or OR³. In some embodiments, X is NH or Y is NHR⁴. In some embodiments, R¹ is C₀₋₂ alkyl or C₁ heteroalkyl. In some embodiments, R² is NHR⁴ or C₁ alkyl. In some embodiments, R⁴ is H or C¹ alkyl. In exemplary embodiments in which Q is a Class 1, Class 2, or Class 3 glucagon related peptide, an amino acid comprising a side chain of Structure I is provided where, R¹ is CH₂—S, X is NH, and R² is CH₃ (acetamidomethyl-cysteine, C(Acm)); R¹ is CH₂, X is NH, and R² is CH₃ (acetyldiaminobutanoic acid, Dab(Ac)); R¹ is C₀ alkyl, X is NH, R² is NHR⁴, and R⁴ is H (carbamoyldiaminopropanoic acid, Dap(urea)); or R¹ is CH₂—CH₂, X is NH, and R² is CH₃ (acetylornithine, Orn(Ac)). In exemplary embodiments an amino acid comprising a side chain of Structure II is provided where, R¹ is CH₂, Y is NHR⁴, and R⁴ is CH₃ (methylglutamine, Q(Me)); In exemplary embodiments an amino acid comprising a side chain of Structure 1111 is provided where, R¹ is CH₂ and R⁴ is H (methionine-sulfoxide, M(O)); In specific embodiments, the amino acid at position 3 is substituted with Dab(Ac).

### Acylation of Q

[0299] In some embodiments, the glucagon related peptide (e.g. a Class 1 glucagon related peptide, Class 2 glucagon related peptide, Class 3 glucagon related peptide, Class 4 glucagon related peptide, Class 4 glucagon related peptides or Class 5 glucagon related peptide), Q is modified to comprise an acyl group. The acyl group can be covalently linked directly to an amino acid of the peptide Q, or indirectly to an amino acid of Q via a spacer, wherein the spacer is positioned between the amino acid of Q and the acyl group. Q may be acylated at the same amino acid position where a hydrophilic moiety is linked, or at a different amino acid position. As described herein, Q can be a glucagon superfamily peptide, glucagon related peptide, including a Class 1, 2, 3, 4 or 5 glucagon related peptide, or osteocalcin, calcitonin, amylin, or an analog, derivative or conjugate thereof. For example, Q may be one of Class 1, Class 2, Class 3, Class 4 or Class 5, and may comprise an acyl group which is non-native to a naturally-occurring amino acid. Acylation can be carried out at any position within Q. Where Q is a glucagon related peptide, acylation may occur at any position including any of positions 1-29, a position within a C-terminal extension, or the C-terminal amino acid, provided that the activity exhibited by the non-acylated glucagon related peptide is retained upon acylation. For example, if the unacylated peptide has glucagon agonist activity, then the acylated peptide retains the glucagon agonist activity. Also for example, if the unacylated peptide has glucagon antagonist activity, then the acylated peptide retains the glucagon antagonist activity. For instance, if the unacylated peptide has GLP-1 agonist activity, then the acylated peptide retains GLP-1 agonist activity. Nonlimiting examples include acylation at positions 5, 7, 10, 11, 12, 13, 14, 16, 17, 18, 19, 20, 21, 24, 27, 28, or 29 (according to the amino acid numbering of wild type glucagon). With regard to Class 1, Class 2, and Class 3 glucagon related peptides, acylation may occur at any of positions 5, 7, 10, 11, 12, 13, 14, 16, 17, 18, 19, 20, 21, 24, 27, 28, 29, 30, 37, 38, 39, 40, 41, 42, or 43 (according to the amino acid numbering of wild type glucagon). Other nonlimiting examples with respect to glucagon related peptides (e.g., Class 1, 2, 3, 4, or 5) include acylation at position 10 (according to the amino acid numbering of the wild type glucagon) and pegylation at one or more positions in the C-terminal portion of the glucagon peptide, e.g., position 24, 28 or 29 (according to the amino acid numbering of the wild type glucagon), within a C-terminal extension, or at the C-terminus (e.g., through adding a C-terminal Cys).

[0300] In a specific aspect of the invention, peptide Q (e.g., a glucagon superfamily peptide, a glucagon related peptide, a Class 1, 2, 3, 4 or 5 glucagon related peptide, or osteocalcin, calcitonin, amylin, or an analog, derivative or conjugate thereof) is modified to comprise an acyl group by direct acylation of an amine, hydroxyl, or thiol of a side chain of an amino acid of Q. In some embodiments, Q is directly acylated through the side chain amine, hydroxyl, or thiol of an amino acid. In some embodiments, where Q is a glucagon related peptide, acylation is at position 10, 20, 24, or 29 (according to the amino acid numbering of the wild type glucagon). In this regard, the acylated glucagon related peptide can comprise the amino acid sequence of SEQ ID NO: 1601, or a modified amino acid sequence thereof comprising one or more of the amino acid modifications described herein, with at least one of the amino acids at positions 10, 20, 24, and 29 (according to the amino acid numbering of the wild type glucagon) modified to any amino acid comprising a side chain amine, hydroxyl, or thiol. In some specific embodiments of the invention, where Q is a glucagon related peptide, the direct acylation of the Q occurs through the side chain amine, hydroxyl, or thiol of the amino acid at position 10 (according to the amino acid numbering of the wild type glucagon).

[0301] In some embodiments, the amino acid of peptide Q (e.g., a glucagon superfamily peptide, a glucagon related peptide, a Class 1, 2, 3, 4 or 5 glucagon related peptide, or osteocalcin, calcitonin, amylin, or an analog, derivative or conjugate thereof) comprising a side chain amine is an amino acid of Formula I:

[chemical structure]

In some exemplary embodiments, the amino acid of Formula I, is the amino acid wherein n is 4 (Lys) or n is 3 (Orn).

[0302] In other embodiments, the amino acid of peptide Q comprising a side chain hydroxyl is an amino acid of Formula II:

[chemical structure]

In some exemplary embodiments, the amino acid of Formula II is the amino acid wherein n is 1 (Ser).

[0303] In yet other embodiments, the amino acid of peptide Q comprising a side chain thiol is an amino acid of Formula III:

[chemical structure]

In some exemplary embodiments, the amino acid of Formula III is the amino acid wherein n is 1 (Cys).

[0304] In yet other embodiments, the amino acid of peptide Q comprising a side chain amine, hydroxyl, or thiol is a disubstituted amino acid comprising the same structure of Formula I, Formula II, or Formula III, except that the hydrogen bonded to the alpha carbon of the amino acid of Formula I, Formula II, or Formula III is replaced with a second side chain.

[0305] In some embodiments of the invention, the acylated peptide Q (e.g., a glucagon superfamily peptide, a glucagon related peptide, a Class 1, 2, 3, 4 or 5 glucagon related peptide, or osteocalcin, calcitonin, amylin, or an analog, derivative or conjugate thereof) comprises a spacer between the peptide and the acyl group. In some embodiments, Q is covalently bound to the spacer, which is covalently bound to the acyl group. In some exemplary embodiments, Q is modified to comprise an acyl group by acylation of an amine, hydroxyl, or thiol of a spacer, which spacer (where Q is a glucagon related peptide, e.g., Class 1, 2, 3, 4 or 5) is attached to a side chain of an amino acid at position 10, 20, 24, or 29 (according to the amino acid numbering of the wild type glucagon), or at the C-terminal amino acid of the glucagon related peptide. The amino acid of peptide Q to which the spacer is attached can be any amino acid comprising a moiety which permits linkage to the spacer. For example, an amino acid comprising a side chain —NH₂, —OH, or —COOH (e.g., Lys, Orn, Ser, Asp, or Glu) is suitable. An amino acid of peptide Q (e.g., a singly or doubly α-substituted amino acid) comprising a side chain —NH₂, —OH, or —COOH (e.g., Lys, Orn, Ser, Asp, or Glu) is also suitable. In some embodiments where Q is a glucagon related peptide (e.g., Class 1, 2, 3, 4 or 5), the acylated glucagon related peptide can comprise the amino acid sequence of SEQ ID NO: 1601, or a modified amino acid sequence thereof comprising one or more of the amino acid modifications described herein, with at least one of the amino acids at positions 10, 20, 24, and 29 (according to the amino acid numbering of the wild type glucagon) modified to any amino acid comprising a side chain amine, hydroxyl, or carboxylate.

[0306] In some embodiments, the spacer between the peptide Q and the acyl group is an amino acid comprising a side chain amine, hydroxyl, or thiol, or a dipeptide or tripeptide comprising an amino acid comprising a side chain amine, hydroxyl, or thiol. In some embodiments, the amino acid spacer is not γ-Glu. In some embodiments, the dipeptide spacer is not γ-Glu-γ-Glu.

[0307] When acylation occurs through an amine group of the amino acid of the spacer, the acylation can occur through the alpha amine of the amino acid or a side chain amine. In the instance in which the alpha amine is acylated, the spacer amino acid can be any amino acid. For example, the spacer amino acid can be a hydrophobic amino acid, e.g., Gly, Ala, Val, Leu, Ile, Trp, Met, Phe, Tyr. In some embodiments, the spacer amino acid can be, for example, a hydrophobic amino acid, e.g., Gly, Ala, Val, Leu, Ile, Trp, Met, Phe, Tyr, 6-amino hexanoic acid, 5-aminovaleric acid, 7-aminoheptanoic acid, 8-aminooctanoic acid. Alternatively, the spacer amino acid can be an acidic residue, e.g., Asp and Glu. In the instance in which the side chain amine of the spacer amino acid is acylated, the spacer amino acid is an amino acid comprising a side chain amine, e.g., an amino acid of Formula I (e.g., Lys or Orn). In this instance, it is possible for both the alpha amine and the side chain amine of the spacer amino acid to be acylated, such that the peptide is diacylated. Embodiments of the invention include such diacylated molecules.

[0308] When acylation occurs through a hydroxyl group of the amino acid of the spacer, the amino acid or one of the amino acids of the dipeptide or tripeptide can be an amino acid of Formula II. In a specific exemplary embodiment, the amino acid is Ser.

[0309] When acylation occurs through a thiol group of the amino acid of the spacer, the amino acid or one of the amino acids of the dipeptide or tripeptide can be an amino acid of Formula III. In a specific exemplary embodiment, the amino acid is Cys.

[0310] In some embodiments, the spacer comprises a hydrophilic bifunctional spacer. In a specific embodiment, the spacer comprises an amino poly(alkyloxy)carboxylate. In this regard, the spacer can comprise, for example, NH₂(CH₂CH₂O)ₙ(CH₂)ₘCOOH, wherein m is any integer from 1 to 6 and n is any integer from 2 to 12, such as, e.g., 8-amino-3,6-dioxaoctanoic acid, which is commercially available from Peptides International, Inc. (Louisville, Ky.).

[0311] In some embodiments the spacer between peptide Q and the acyl group comprises a hydrophilic bifunctional spacer. In certain embodiments, the hydrophilic bifunctional spacer comprises two or more reactive groups, e.g., an amine, a hydroxyl, a thiol, and a carboxyl group or any combinations thereof. In certain embodiments, the hydrophilic bifunctional spacer comprises a hydroxyl group and a carboxylate. In other embodiments, the hydrophilic bifunctional spacer comprises an amine group and a carboxylate. In other embodiments, the hydrophilic bifunctional spacer comprises a thiol group and a carboxylate.

[0312] In some embodiments, the spacer between peptide Q and the acyl group is a hydrophobic bifunctional spacer. Hydrophobic bifunctional spacers are known in the art. See, e.g., Bioconjugate Techniques, G. T. Hermanson (Academic Press, San Diego, Calif., 1996), which is incorporated by reference in its entirety. In certain embodiments, the hydrophobic bifunctional spacer comprises two or more reactive groups, e.g., an amine, a hydroxyl, a thiol, and a carboxyl group or any combinations thereof. In certain embodiments, the hydrophobic bifunctional spacer comprises a hydroxyl group and a carboxylate. In other embodiments, the hydrophobic bifunctional spacer comprises an amine group and a carboxylate. In other embodiments, the hydrophobic bifunctional spacer comprises a thiol group and a carboxylate. Suitable hydrophobic bifunctional spacers comprising a carboxylate and a hydroxyl group or a thiol group are known in the art and include, for example, 8-hydroxyoctanoic acid and 8-mercaptooctanoic acid.

[0313] In some embodiments, the bifunctional spacer is not a dicarboxylic acid comprising an unbranched, methylene of 1 to 7 carbon atoms between the carboxylate groups. In some embodiments, the bifunctional spacer is a dicarboxylic acid comprising an unbranched, methylene of 1-7 carbon atoms between the carboxylate groups.

[0314] The spacer (e.g., amino acid, dipeptide, tripeptide, hydrophilic bifunctional spacer, or hydrophobic bifunctional spacer) in specific embodiments, wherein Q is a Class 1, Class 2, or Class 3 glucagon related peptide, is 3 to 10 atoms (e.g., 6 to 10 atoms, (e.g., 6, 7, 8, 9, or 10 atoms) in length. In more specific embodiments in which Q is a Class 1, Class 2, or Class 3 glucagon related peptide, the spacer is about 3 to 10 atoms (e.g., 6 to 10 atoms) in length and the acyl group is a C12 to C18 fatty acyl group, e.g., C14 fatty acyl group, C16 fatty acyl group, such that the total length of the spacer and acyl group is 14 to 28 atoms, e.g., about 14, 15, 16, 17, 18, 19, 20, 21, 22, 23, 24, 25, 26, 27, or 28 atoms. In some embodiments, in which Q is a Class 1, Class 2, or Class 3 glucagon related peptide the length of the spacer and acyl group is 17 to 28 (e.g., 19 to 26, 19 to 21) atoms.

[0315] In accordance with certain embodiments in which Q is a Class 1, Class 2, or Class 3 glucagon related peptide, the bifunctional spacer can be a synthetic or naturally occurring amino acid (including, but not limited to, any of those described herein) comprising an amino acid backbone that is 3 to 10 atoms in length (e.g., 6-amino hexanoic acid, 5-aminovaleric acid, 7-aminoheptanoic acid, and 8-aminooctanoic acid). Alternatively, the spacer attached to the Class 1, Class 2, or Class 3 glucagon related peptide can be a dipeptide or tripeptide spacer having a peptide backbone that is 3 to 10 atoms (e.g., 6 to 10 atoms) in length. Each amino acid of the dipeptide or tripeptide spacer attached to the Class 1, Class 2, or Class 3 glucagon related peptide can be the same as or different from the other amino acid(s) of the dipeptide or tripeptide and can be independently selected from the group consisting of: naturally-occurring and/or non-naturally occurring amino acids, including, for example, any of the D or L isomers of the naturally-occurring amino acids (Ala, Cys, Asp, Glu, Phe, Gly, His, Ile, Lys, Leu, Met, Asn, Pro, Arg, Ser, Thr, Val, Trp, Tyr), or any D or L isomers of the non-naturally occurring amino acids selected from the group consisting of: β-alanine (β-Ala), N-α-methyl-alanine (Me-Ala), aminobutyric acid (Abu), α-aminobutyric acid (γ-Abu), aminohexanoic acid (ε-Ahx), aminoisobutyric acid (Aib), aminomethylpyrrole carboxylic acid, aminopiperidinecarboxylic acid, aminoserine (Ams), aminotetrahydropyran-4-carboxylic acid, arginine N-methoxy-N-methyl amide, β-aspartic acid (β-Asp), azetidine carboxylic acid, 3-(2-benzothiazolyl)alanine, α-tert-butylglycine, 2-amino-5-ureido-n-valeric acid (citrulline, Cit), β-Cyclohexylalanine (Cha), acetamidomethyl-cysteine, diaminobutanoic acid (Dab), diaminopropionic acid (Dpr), dihydroxyphenylalanine (DOPA), dimethylthiazolidine (DMTA), γ-Glutamic acid (γ-Glu), homoserine (Hse), hydroxyproline (Hyp), isoleucine N-methoxy-N-methyl amide, methyl-isoleucine (MeIle), isonipecotic acid (Isn), methyl-leucine (MeLeu), methyl-lysine, dimethyl-lysine, trimethyl-lysine, methanoproline, methionine-sulfoxide (Met(O)), methionine-sulfone (Met(O2)), norleucine (Nle), methyl-norleucine (Me-Nle), norvaline (Nva), ornithine (Orn), para-aminobenzoic acid (PABA), penicillamine (Pen), methylphenylalanine (MePhe), 4-Chlorophenylalanine (Phe(4-Cl)), 4-fluorophenylalanine (Phe(4-F)), 4-nitrophenylalanine (Phe(4-NO2)), 4-cyanophenylalanine ((Phe(4-CN)), phenylglycine (Phg), piperidinylalanine, piperidinylglycine, 3,4-dehydroproline, pyrrolidinylalanine, sarcosine (Sar), selenocysteine (Sec), O-Benzyl-phosphoserine, 4-amino-3-hydroxy-6-methylheptanoic acid (Sta), 4-amino-5-cyclohexyl-3-hydroxypentanoic acid (ACHPA), 4-amino-3-hydroxy-5-phenylpentanoic acid (AHPPA), 1,2,3,4,-tetrahydro-isoquinoline-3-carboxylic acid (Tic), tetrahydropyranglycine, thienylalanine (Thi), O-benzyl-phosphotyrosine, O-Phosphotyrosine, methoxytyrosine, ethoxytyrosine, O-(bis-dimethylamino-phosphono)-tyrosine, tyrosine sulfate tetrabutylamine, methyl-valine (MeVal), 1-amino-1-cyclohexane carboxylic acid (Acx), aminovaleric acid, beta-cyclopropyl-alanine (Cpa), propargylglycine (Prg), allylglycine (Alg), 2-amino-2-cyclohexyl-propanoic acid (2-Cha), tertbutylglycine (Tbg), vinylglycine (Vg), 1-amino-1-cyclopropane carboxylic acid (Acp), 1-amino-1-cyclopentane carboxylic acid (Acpe), alkylated 3-mercaptopropionic acid, 1-amino-1-cyclobutane carboxylic acid (Acb).

[0316] In some embodiments in which Q is a Class 1, Class 2, or Class 3 glucagon related peptide, the spacer comprises an overall negative charge, e.g., comprises one or two negatively charged amino acids. In some embodiments in which Q is a Class 1, Class 2, or Class 3 glucagon related peptide, the dipeptide is not any of the dipeptides of general structure A-B, wherein A is selected from the group consisting of Gly, Gln, Ala, Arg, Asp, Asn, Ile, Leu, Val, Phe, and Pro, wherein B is selected from the group consisting of Lys, His, Trp. In some embodiments in which Q is a Class 1, Class 2, or Class 3 glucagon related peptide, the dipeptide spacer is selected from the group consisting of: Ala-Ala, β-Ala-β-Ala, Leu-Leu, Pro-Pro, γ-aminobutyric acid-γ-aminobutyric acid, and γ-Glu-γ-Glu.

[0317] The peptide Q can be modified to comprise an acyl group by acylation of a long chain alkane. In specific aspects, the long chain alkane comprises an amine, hydroxyl, or thiol group (e.g. octadecylamine, tetradecanol, and hexadecanethiol) which reacts with a carboxyl group, or activated form thereof, of the peptide Q. The carboxyl group, or activated form thereof, of Q can be part of a side chain of an amino acid (e.g., glutamic acid, aspartic acid) of Q or can be part of the peptide backbone.

[0318] In certain embodiments, the peptide Q is modified to comprise an acyl group by acylation of the long chain alkane by a spacer which is attached to Q. In specific aspects, the long chain alkane comprises an amine, hydroxyl, or thiol group which reacts with a carboxyl group, or activated form thereof, of the spacer. Suitable spacers comprising a carboxyl group, or activated form thereof, are described herein and include, for example, bifunctional spacers, e.g., amino acids, dipeptides, tripeptides, hydrophilic bifunctional spacers and hydrophobic bifunctional spacers.

[0319] As used herein, the term “activated form of a carboxyl group” refers to a carboxyl group with the general formula R(C═O)X, wherein X is a leaving group and R is Q or the spacer. For example, activated forms of a carboxyl groups may include, but are not limited to, acyl chlorides, anhydrides, and esters. In some embodiments, the activated carboxyl group is an ester with a N-hydroxysuccinimide (NHS) leaving group.

[0320] With regard to these aspects of the invention, in which a long chain alkane is acylated by the peptide Q or the spacer, the long chain alkane may be of any size and can comprise any length of carbon chain. The long chain alkane can be linear or branched. In certain aspects, the long chain alkane is a C4 to C30 alkane. For example, the long chain alkane can be any of a C4 alkane, C6 alkane, C8 alkane, C10 alkane, C12 alkane, C14 alkane, C16 alkane, C18 alkane, C20 alkane, C22 alkane, C24 alkane, C26 alkane, C28 alkane, or a C30 alkane. In some embodiments, the long chain alkane comprises a C8 to C20 alkane, e.g., a C14 alkane, C16 alkane, or a C18 alkane.

[0321] In some embodiments, an amine, hydroxyl, or thiol group of Q is acylated with a cholesterol acid. In a specific embodiment, the peptide is linked to the cholesterol acid through an alkylated des-amino Cys spacer, i.e., an alkylated 3-mercaptopropionic acid spacer.

[0322] Suitable methods of peptide acylation via amines, hydroxyls, and thiols are known in the art. See, for example, Miller, Biochem Biophys Res Commun 218: 377-382 (1996); Shimohigashi and Stammer, Int J Pept Protein Res 19: 54-62 (1982); and Previero et al., Biochim Biophys Acta 263: 7-13 (1972) (for methods of acylating through a hydroxyl); and San and Silvius, J Pept Res 66: 169-180 (2005) (for methods of acylating through a thiol); Bioconjugate Chem. “Chemical Modifications of Proteins: History and Applications” pages 1, 2-12 (1990); Hashimoto et al., Pharmacuetical Res. “Synthesis of Palmitoyl Derivatives of Insulin and their Biological Activity” Vol. 6, No: 2 pp. 171-176 (1989).

[0323] The acyl group of the acylated peptide Q can be of any size, e.g., any length carbon chain, and can be linear or branched. In some specific embodiments of the invention, the acyl group is a C4 to C30 fatty acid. For example, the acyl group can be any of a C4 fatty acid, C6 fatty acid, C8 fatty acid, C10 fatty acid, C12 fatty acid, C14 fatty acid, C16 fatty acid, C18 fatty acid, C20 fatty acid, C22 fatty acid, C24 fatty acid, C26 fatty acid, C28 fatty acid, or a C30 fatty acid. In some embodiments, the acyl group is a C8 to C20 fatty acid, e.g., a C14 fatty acid or a C16 fatty acid.

[0324] In an alternative embodiment, the acyl group is a bile acid. The bile acid can be any suitable bile acid, including, but not limited to, cholic acid, chenodeoxycholic acid, deoxycholic acid, lithocholic acid, taurocholic acid, glycocholic acid, and cholesterol acid.

[0325] The acylated peptides Q described herein can be further modified to comprise a hydrophilic moiety. In some specific embodiments the hydrophilic moiety can comprise a polyethylene glycol (PEG) chain. The incorporation of a hydrophilic moiety can be accomplished through any suitable means, such as any of the methods described herein. In some embodiments related to Class 1, 2, 3, 4 or 5 glucagon related peptides, the acylated glucagon related peptide can comprise SEQ ID NO: 1601, including any of the modifications described herein, in which at least one of the amino acids at position 10, 20, 24, and 29 (according to the amino acid numbering of the wild type glucagon) comprise an acyl group and at least one of the amino acids at position 16, 17, 21, 24, or 29 (according to the amino acid numbering of the wild type glucagon), a position within a C-terminal extension, or the C-terminal amino acid are modified to a Cys, Lys, Orn, homo-Cys, or Ac-Phe, and the side chain of the amino acid is covalently bonded to a hydrophilic moiety (e.g., PEG). In some embodiments related to Class 1, 2, 3, 4 or 5 glucagon related peptides, the acyl group is attached to position 10 (according to the amino acid numbering of the wild type glucagon), optionally via a spacer comprising Cys, Lys, Orn, homo-Cys, or Ac-Phe, and the hydrophilic moiety is incorporated at a Cys residue at position 24.

[0326] Alternatively, the acylated peptide (Q) can comprise a spacer, wherein the spacer is both acylated and modified to comprise the hydrophilic moiety. Nonlimiting examples of suitable spacers include a spacer comprising one or more amino acids selected from the group consisting of Cys, Lys, Orn, homo-Cys, and Ac-Phe.

### Alkylation of Q

[0327] In some embodiments, Q is modified to comprise an alkyl group. The alkyl group can be covalently linked directly to an amino acid of the peptide Q, or indirectly to an amino acid of Q via a spacer, wherein the spacer is positioned between the amino acid of Q and the alkyl group. The alkyl group can be attached to Q via an ether, thioether, or amino linkage, for example. Q may be alkylated at the same amino acid position where a hydrophilic moiety is linked, or at a different amino acid position. As described herein, Q can be a glucagon superfamily peptide, glucagon related peptide, including a Class 1, 2, 3, 4 or 5 glucagon related peptide, or osteocalcin, calcitonin, amylin, or an analog, derivative or conjugate thereof. For example, Q may be a Class 1, Class 2, or Class 3 glucagon related peptide, and may comprise an alkyl group which is non-native to a naturally-occurring amino acid.

[0328] Alkylation can be carried out at any position within Q. Where Q is a glucagon related peptide, alkylation may occur at any position including any of positions 1-29, a position within a C-terminal extension, or the C-terminal amino acid, provided that an agonist activity of the unalkyated peptide with respect to glucagon, GLP-1, GIP or other glucagon-related peptide receptor is retained upon alkylation. In some embodiments, if the unalkylated peptide has glucagon agonist activity, then the alkylated peptide retains glucagon agonist activity is retained. In some embodiments, if the unalkylated peptide has GLP-1 agonist activity, then the alkylated peptide retains GLP-1 agonist activity. Nonlimiting examples include alkylation at positions 5, 7, 10, 11, 12, 13, 14, 16, 17, 18, 19, 20, 21, 24, 27, 28, or 29 (according to the amino acid numbering of wild type glucagon). With regard to Class 1, Class 2, and Class 3 glucagon related peptides, alkylation can occur at positions 5, 7, 10, 11, 12, 13, 14, 16, 17, 18, 19, 20, 21, 24, 27, 28, 29, 30, 37, 38, 39, 40, 41, 42, or 43 (according to the amino acid numbering of wild type glucagon). Other nonlimiting examples with respect to glucagon related peptides (e.g. Class, 1, 2, 3, 4 or 5) include alkylation at position 10 (according to the amino acid numbering of wild type glucagon) and pegylation at one or more positions in the C-terminal portion of the glucagon related peptide, e.g., position 24, 28 or 29 (according to the amino acid numbering of wild type glucagon), within a C-terminal extension, or at the C-terminus (e.g., through adding a C-terminal Cys).

[0329] In a specific aspect of the invention, peptide Q (e.g. a glucagon superfamily peptide, a glucagon related peptide, a Class 1, 2, 3, 4 or 5 glucagon related peptide, or osteocalcin, calcitonin, amylin, or an analog, derivative or conjugate thereof) is modified to comprise an alkyl group by direct alkylation of an amine, hydroxyl, or thiol of a side chain of an amino acid of Q. In some embodiments, Q is directly alkylated through the side chain amine, hydroxyl, or thiol of an amino acid. In some embodiments, where Q is a glucagon related peptide, alkylation is at position 10, 20, 24, or 29 (according to the amino acid numbering of wild type glucagon). In this regard, the alkylated glucagon related peptide can comprise the amino acid sequence of SEQ ID NO: 1601, or a modified amino acid sequence thereof comprising one or more of the amino acid modifications described herein, with at least one of the amino acids at positions 10, 20, 24, and 29 (according to the amino acid numbering of wild type glucagon) modified to any amino acid comprising a side chain amine, hydroxyl, or thiol. In some specific embodiments of the invention, where Q is a glucagon related peptide, the direct alkylation of Q occurs through the side chain amine, hydroxyl, or thiol of the amino acid at position 10 (according to the amino acid numbering of wild type glucagon).

[0330] In some embodiments, the amino acid of peptide Q (e.g. a glucagon superfamily peptide, a glucagon related peptide, a Class 1, 2, 3, 4 or 5 glucagon related peptide, or osteocalcin, calcitonin, amylin, or an analog, derivative or conjugate thereof) comprising a side chain amine is an amino acid of Formula I. In some exemplary embodiments, the amino acid of Formula I, is the amino acid wherein n is 4 (Lys) or n is 3 (Orn).

[0331] In other embodiments, the amino acid of peptide Q comprising a side chain hydroxyl is an amino acid of Formula II. In some exemplary embodiments, the amino acid of Formula II is the amino acid wherein n is 1 (Ser).

[0332] In yet other embodiments, the amino acid of peptide Q comprising a side chain thiol is an amino acid of Formula III. In some exemplary embodiments, the amino acid of Formula II is the amino acid wherein n is 1 (Cys).

[0333] In yet other embodiments, the amino acid of peptide Q comprising a side chain amine, hydroxyl, or thiol is a disubstituted amino acid comprising the same structure of Formula I, Formula II, or Formula III, except that the hydrogen bonded to the alpha carbon of the amino acid of Formula I, Formula II, or Formula III is replaced with a second side chain.

[0334] In some embodiments of the invention, the alkylated peptide Q (e.g. a glucagon superfamily peptide, a glucagon related peptide, a Class 1, 2, 3, 4 or 5 glucagon related peptide, or osteocalcin, calcitonin, amylin, or an analog, derivative or conjugate thereof) comprises a spacer between the peptide and the alkyl group. In some embodiments, the Q is covalently bound to the spacer, which is covalently bound to the alkyl group. In some exemplary embodiments, peptide Q is modified to comprise an alkyl group by alkylation of an amine, hydroxyl, or thiol of a spacer, which spacer (where Q is a glucagon related peptide, e.g., Class 1, 2, 3, 4 or 5) is attached to a side chain of an amino acid at position 10, 20, 24, or 29 (according to the amino acid numbering of wild type glucagon) of Q. The amino acid of peptide Q to which the spacer is attached can be any amino acid comprising a moiety which permits linkage to the spacer. The amino acid of peptide Q to which the spacer is attached can be any amino acid (e.g., a singly α-substituted amino acid or an α,α-disubstituted amino acid) comprising a moiety which permits linkage to the spacer. An amino acid of peptide Q comprising a side chain —NH₂, —OH, or —COOH (e.g., Lys, Orn, Ser, Asp, or Glu) is suitable. In some embodiments where Q is a glucagon related peptide (e.g., Class 1, 2, 3, 4 or 5), the alkylated Q can comprise the amino acid sequence of SEQ ID NO: 1601, or a modified amino acid sequence thereof comprising one or more of the amino acid modifications described herein, with at least one of the amino acids at positions 10, 20, 24, and 29 (according to the amino acid numbering of wild type glucagon) modified to any amino acid comprising a side chain amine, hydroxyl, or carboxylate.

[0335] In some embodiments, the spacer between the peptide Q and the alkyl group is an amino acid comprising a side chain amine, hydroxyl, or thiol or a dipeptide or tripeptide comprising an amino acid comprising a side chain amine, hydroxyl, or thiol. In some embodiments, the amino acid spacer is not γ-Glu. In some embodiments, the dipeptide spacer is not γ-Glu-γ-Glu.

[0336] When alkylation occurs through an amine group of the amino acid of the spacer the alkylation can occur through the alpha amine of the amino acid or a side chain amine. In the instance in which the alpha amine is alkylated, the spacer amino acid can be any amino acid. For example, the spacer amino acid can be a hydrophobic amino acid, e.g., Gly, Ala, Val, Leu, Ile, Trp, Met, Phe, Tyr. Alternatively, the spacer amino acid can be an acidic residue, e.g., Asp and Glu. In exemplary embodiments, the spacer amino acid can be a hydrophobic amino acid, e.g., Gly, Ala, Val, Leu, Ile, Trp, Met, Phe, Tyr, 6-amino hexanoic acid, 5-aminovaleric acid, 7-aminoheptanoic acid, 8-aminooctanoic acid. Alternatively, the spacer amino acid can be an acidic residue, e.g., Asp and Glu, provided that the alkylation occurs on the alpha amine of the acidic residue. In the instance in which the side chain amine of the spacer amino acid is alkylated, the spacer amino acid is an amino acid comprising a side chain amine, e.g., an amino acid of Formula I (e.g., Lys or Orn). In this instance, it is possible for both the alpha amine and the side chain amine of the spacer amino acid to be alkylated, such that the peptide is dialkylated. Embodiments of the invention include such dialkylated molecules.

[0337] When alkylation occurs through a hydroxyl group of the amino acid of the spacer, the amino acid or one of the amino acids of the spacer can be an amino acid of Formula II. In a specific exemplary embodiment, the amino acid is Ser.

[0338] When alkylation occurs through a thiol group of the amino acid of the spacer, the amino acid or one of the amino acids of the spacer can be an amino acid of Formula III. In a specific exemplary embodiment, the amino acid is Cys.

[0339] In some embodiments, the spacer comprises a hydrophilic bifunctional spacer. In a specific embodiment, the spacer comprises an amino poly(alkyloxy)carboxylate. In this regard, the spacer can comprise, for example, NH₂(CH₂CH₂O)ₙ(CH₂)ₘCOOH, wherein m is any integer from 1 to 6 and n is any integer from 2 to 12, such as, e.g., 8-amino-3,6-dioxaoctanoic acid, which is commercially available from Peptides International, Inc. (Louisville, Ky.).

[0340] In some embodiments, the spacer between peptide Q and the alkyl group is a hydrophilic bifunctional spacer. In certain embodiments, the hydrophilic bifunctional spacer comprises two or more reactive groups, e.g., an amine, a hydroxyl, a thiol, and a carboxyl group or any combinations thereof. In certain embodiments, the hydrophilic bifunctional spacer comprises a hydroxyl group and a carboxylate. In other embodiments, the hydrophilic bifunctional spacer comprises an amine group and a carboxylate. In other embodiments, the hydrophilic bifunctional spacer comprises a thiol group and a carboxylate.

[0341] In some embodiments, the spacer between peptide Q and the alkyl group is a hydrophobic bifunctional spacer. In certain embodiments, the hydrophobic bifunctional spacer comprises two or more reactive groups, e.g., an amine, a hydroxyl, a thiol, and a carboxyl group or any combinations thereof. In certain embodiments, the hydrophobic bifunctional spacer comprises a hydroxyl group and a carboxylate. In other embodiments, the hydropholic bifunctional spacer comprises an amine group and a carboxylate. In other embodiments, the hydropholic bifunctional spacer comprises a thiol group and a carboxylate. Suitable hydrophobic bifunctional spacers comprising a carboxylate and a hydroxyl group or a thiol group are known in the art and include, for example, 8-hydroxyoctanoic acid and 8-mercaptooctanoic acid.

[0342] The spacer (e.g., amino acid, dipeptide, tripeptide, hydrophilic bifunctional spacer, or hydrophobic bifunctional spacer) in specific embodiments in which Q is a Class 1, Class 2, or Class 3 glucagon related peptide is 3 to 10 atoms (e.g., 6 to 10 atoms, (e.g., 6, 7, 8, 9, or 10 atoms)) in length. In more specific embodiments, the spacer attached to the Class 1, Class 2, or Class 3 glucagon related peptide is about 3 to 10 atoms (e.g., 6 to 10 atoms) in length and the alkyl is a C12 to C18 alkyl group, e.g., C14 alkyl group, C16 alkyl group, such that the total length of the spacer and alkyl group is 14 to 28 atoms, e.g., about 14, 15, 16, 17, 18, 19, 20, 21, 22, 23, 24, 25, 26, 27, or 28 atoms. In some embodiments in which Q is a Class 1, Class 2, or Class 3 glucagon related peptide, the length of the spacer and alkyl is 17 to 28 (e.g., 19 to 26, 19 to 21) atoms.

[0343] In accordance with certain foregoing embodiments in which Q is a Class 1, Class 2, or Class 3 glucagon related peptide, the bifunctional spacer can be a synthetic or non-naturally occurring amino acid comprising an amino acid backbone that is 3 to 10 atoms in length (e.g., 6-amino hexanoic acid, 5-aminovaleric acid, 7-aminoheptanoic acid, and 8-aminooctanoic acid). Alternatively, the spacer attached to the Class 1, Class 2, or Class 3 glucagon related peptide can be a dipeptide or tripeptide spacer having a peptide backbone that is 3 to 10 atoms (e.g., 6 to 10 atoms) in length. The dipeptide or tripeptide spacer attached to the Class 1, Class 2, or Class 3 glucagon related peptide can be composed of naturally-occurring and/or non-naturally occurring amino acids, including, for example, any of the amino acids taught herein. In some embodiments in which Q is a Class 1, Class 2, or Class 3 glucagon related peptide, the spacer comprises an overall negative charge, e.g., comprises one or two negatively charged amino acids. In some embodiments in which Q is a Class 1, Class 2, or Class 3 glucagon related peptide, the dipeptide spacer is selected from the group consisting of: Ala-Ala, β-Ala-β-Ala, Leu-Leu, Pro-Pro, γ-aminobutyric acid-γ-aminobutyric acid, and γ-Glu-γ-Glu. In some embodiments, the dipeptide spacer is not γ-Glu-γ-Glu.

[0344] Suitable methods of peptide alkylation via amines, hydroxyls, and thiols are known in the art. For example, a Williamson ether synthesis can be used to form an ether linkage between the glucagon related peptide and the alkyl group. Also, a nucleophilic substitution reaction of the peptide with an alkyl halide can result in any of an ether, thioether, or amino linkage.

[0345] The alkyl group of the alkylated peptide Q can be of any size, e.g., any length carbon chain, and can be linear or branched. In some embodiments of the invention, the alkyl group is a C4 to C30 alkyl. For example, the alkyl group can be any of a C4 alkyl, C6 alkyl, C8 alkyl, C10 alkyl, C12 alkyl, C14 alkyl, C16 alkyl, C18 alkyl, C20 alkyl, C22 alkyl, C24 alkyl, C26 alkyl, C28 alkyl, or a C30 alkyl. In some embodiments, the alkyl group is a C8 to C20 alkyl, e.g., a C14 alkyl or a C16 alkyl.

[0346] In some specific embodiments, the alkyl group comprises a steroid moiety of a bile acid, e.g., cholic acid, chenodeoxycholic acid, deoxycholic acid, lithocholic acid, taurocholic acid, glycocholic acid, and cholesterol acid.

[0347] In some embodiments of the invention, peptide Q is modified to comprise an alkyl group by reacting a nucleophilic, long chain alkane with Q, wherein Q comprises a leaving group suitable for nucleophilic substitution. In specific aspects, the nucleophilic group of the long chain alkane comprises an amine, hydroxyl, or thiol group (e.g. octadecylamine, tetradecanol, and hexadecanethiol). The leaving group of Q can be part of a side chain of an amino acid or can be part of the peptide backbone. Suitable leaving groups include, for example, N-hydroxysuccinimide, halogens, and sulfonate esters.

[0348] In certain embodiments, peptide Q is modified to comprise an alkyl group by reacting the nucleophilic, long chain alkane with a spacer, which is attached to Q, wherein the spacer comprises the leaving group. In specific aspects, the long chain alkane comprises an amine, hydroxyl, or thiol group. In certain embodiments, the spacer comprising the leaving group can be any spacer discussed herein, e.g., amino acids, dipeptides, tripeptides, hydrophilic bifunctional spacers and hydrophobic bifunctional spacers further comprising a suitable leaving group.

[0349] With regard to these aspects of the invention in which a long chain alkane is alkylated by peptide Q or the spacer, the long chain alkane may be of any size and can comprise any length of carbon chain. The long chain alkane can be linear or branched. In certain aspects, the long chain alkane is a C4 to C30 alkane. For example, the long chain alkane can be any of a C4 alkane, C6 alkane, C8 alkane, C10 alkane, C12 alkane, C14 alkane, C16 alkane, C18 alkane, C20 alkane, C22 alkane, C24 alkane, C26 alkane, C28 alkane, or a C30 alkane. In some embodiments in which the glucagon related peptide is a Class 1, Class 2, or Class 3 glucagon related peptide, the long chain alkane comprises a C8 to C20 alkane, e.g., a C14 alkane, C16 alkane, or a C18 alkane.

[0350] Also, in some embodiments alkylation can occur between Q and a cholesterol moiety. For example, the hydroxyl group of cholesterol can displace a leaving group on the long chain alkane to form a cholesterol-glucagon peptide product.

[0351] The alkylated peptides (Q) described herein can be further modified to comprise a hydrophilic moiety. In some specific embodiments the hydrophilic moiety can comprise a polyethylene glycol (PEG) chain. The incorporation of a hydrophilic moiety can be accomplished through any suitable means, such as any of the methods described herein. In some embodiments related to Class 1, 2, 3, 4 or 5 glucagon related peptides the alkylated Q can comprise SEQ ID NO: 1601, or a modified amino acid sequence thereof comprising one or more of the amino acid modifications described herein, in which at least one of the amino acids at position 10, 20, 24, and 29 (according to the amino acid numbering of wild type glucagon) comprise an alkyl group and at least one of the amino acids at position 16, 17, 21, 24, and 29, a position within a C-terminal extension or the C-terminal amino acid are modified to a Cys, Lys, Orn, homo-Cys, or Ac-Phe, and the side chain of the amino acid is covalently bonded to a hydrophilic moiety (e.g., PEG). In some embodiments related to Class 1, 2, 3, 4 or 5 glucagon related peptides, the alkyl group is attached to position 10 (according to the amino acid numbering of wild type glucagon), optionally via a spacer comprising Cys, Lys, Orn, homo-Cys, or Ac-Phe, and the hydrophilic moiety is incorporated at a Cys residue at position 24.

[0352] Alternatively, the alkylated peptide Q can comprise a spacer, wherein the spacer is both alkylated and modified to comprise the hydrophilic moiety. Nonlimiting examples of suitable spacers include a spacer comprising one or more amino acids selected from the group consisting of Cys, Lys, Orn, homo-Cys, and Ac-Phe.

### Stabilization of the Alpha-Helix Structure

[0353] In some embodiments, an intramolecular bridge is formed between two amino acid side chains to stabilize the three dimensional structure of the carboxy terminal portion (e.g., amino acids 12-29 (according to the amino acid numbering of wild type glucagon)) of Class 1, 2, 3, 4, or 5 glucagon related peptide Q. The two amino acid side chains can be linked to one another through hydrogen-bonding, ionic interactions, such as the formation of salt bridges, or by covalent bonds.

[0354] In some embodiments, the intramolecular bridge is formed between two amino acids that are 3 amino acids apart, e.g., amino acids at positions i and i+4, wherein i is any integer between 12 and 25 (e.g., 12, 13, 14, 15, 16, 17, 18, 19, 20, 21, 22, 23, 24, and 25) according to the amino acid numbering of wild type glucagon. More particularly, the side chains of the amino acid pairs 12 and 16, 16 and 20, 20 and 24 or 24 and 28 (amino acid pairs in which i=12, 16, 20, or 24) according to the amino acid numbering of wild type glucagon are linked to one another and thus stabilize the glucagon alpha helix. Alternatively, i can be 17.

[0355] In some specific embodiments, wherein the amino acids at positions i and i+4 are joined by an intramolecular bridge, the size of the linker is about 8 atoms, or about 7-9 atoms.

[0356] In other embodiments, the intramolecular bridge is formed between two amino acids that are two amino acids apart, e.g., amino acids at positions j and j+3, wherein j is any integer between 12 and 26 (e.g., 12, 13, 14, 15, 16, 17, 18, 19, 20, 21, 22, 23, 24, 25, and 26) according to the amino acid numbering of wild type glucagon. In some specific embodiments, j is 17.

[0357] In some specific embodiments, wherein amino acids at positions j and j+3 are joined by an intramolecular bridge, the size of the linker is about 6 atoms, or about 5 to 7 atoms.

[0358] In yet other embodiments, the intramolecular bridge is formed between two amino acids that are 6 amino acids apart, e.g., amino acids at positions k and k+7, wherein k is any integer between 12 and 22 (e.g., 12, 13, 14, 15, 16, 17, 18, 19, 20, 21, and 22) according to the amino acid numbering of wild type glucagon. In some specific embodiments, k is 12, 13, or 17. In an exemplary embodiment, k is 17.

[0359] Examples of amino acid pairings that are capable of covalently bonding to form a six-atom linking bridge include Orn and Asp, Glu and an amino acid of Formula I, wherein n is 2, and homoglutamic acid and an amino acid of Formula I, wherein n is 1, wherein Formula I is:

[chemical structure]

[0360] Examples of amino acid pairing that are capable of covalently bonding to form a seven-atom linking bridge include Orn-Glu (lactam ring); Lys-Asp (lactam); or Homoser-Homoglu (lactone). Examples of amino acid pairings that may form an eight-atom linker include Lys-Glu (lactam); Homolys-Asp (lactam); Orn-Homoglu (lactam); 4-aminoPhe-Asp (lactam); or Tyr-Asp (lactone). Examples of amino acid pairings that may form a nine-atom linker include Homolys-Glu (lactam); Lys-Homoglu (lactam); 4-aminoPhe-Glu (lactam); or Tyr-Glu (lactone). Any of the side chains on these amino acids may additionally be substituted with additional chemical groups, so long as the three-dimensional structure of the alpha-helix is not disrupted. One of ordinary skill in the art can envision alternative pairings or alternative amino acid analogs, including chemically modified derivatives that would create a stabilizing structure of similar size and desired effect. For example, a homocysteine-homocysteine disulfide bridge is 6 atoms in length and may be further modified to provide the desired effect. Even without covalent linkage, the amino acid pairings described above or similar pairings that one of ordinary skill in the art can envision may also provide added stability to the alpha-helix through non-covalent bonds, for example, through formation of salt bridges or hydrogen-bonding interactions.

[0361] The size of a lactam ring can vary depending on the length of the amino acid side chains, and in some embodiments the lactam is formed by linking the side chains of a lysine amino acid to a glutamic acid side chain. Further exemplary embodiments (according to the amino acid numbering of wild type glucagon) include the following pairings, optionally with a lactam bridge: Glu at position 12 with Lys at position 16; native Lys at position 12 with Glu at position 16; Glu at position 16 with Lys at position 20; Lys at position 16 with Glu at position 20; Glu at position 20 with Lys at position 24; Lys at position 20 with Glu at position 24; Glu at position 24 with Lys at position 28; Lys at position 24 with Glu at position 28. Alternatively, the order of the amide bond in the lactam ring can be reversed (e.g., a lactam ring can be formed between the side chains of a Lys12 and a Glu16 or alternatively between a Glu 12 and a Lys16).

[0362] Intramolecular bridges other than a lactam bridge can be used to stabilize the alpha helix of Q. In some embodiments, the intramolecular bridge is a hydrophobic bridge. In this instance, the intramolecular bridge optionally is between the side chains of two amino acids that are part of the hydrophobic face of the alpha helix of Q. For example, one of the amino acids joined by the hydrophobic bridge can be the amino acid at position 10, 14, and 18 (according to the amino acid numbering of wild type glucagon).

[0363] In one specific aspect, olefin metathesis is used to cross-link one or two turns of the alpha helix of Q using an all-hydrocarbon cross-linking system. Q in this instance can comprise α-methylated amino acids bearing olefinic side chains of varying length and configured with either R or S stereochemistry at the i and i+4 or i+7 positions. For example, the olefinic side can comprise (CH₂)ₙ, wherein n is any integer between 1 to 6. In some embodiments, n is 3 for a cross-link length of 8 atoms. Suitable methods of forming such intramolecular bridges are described in the art. See, for example, Schafineister et al., J. Am. Chem. Soc. 122: 5891-5892 (2000) and Walensky et al., Science 305: 1466-1470 (2004). Alternatively, Q can comprise O-allyl Ser residues located on adjacent helical turns, which are bridged together via ruthenium-catalyzed ring closing metathesis. Such procedures of cross-linking are described in, for example, Blackwell et al., Angew, Chem., Int. Ed. 37: 3281-3284 (1998).

[0364] In another specific aspect, use of the unnatural thio-dialanine amino acid, lanthionine, which has been widely adopted as a peptidomimetic of cystine, is used to cross-link one turn of the alpha helix. Suitable methods of lanthionine-based cyclization are known in the art. See, for instance, Matteucci et al., Tetrahedron Letters 45: 1399-1401 (2004); Mayer et al., J. Peptide Res. 51: 432-436 (1998); Polinsky et al., J. Med. Chem. 35: 4185-4194 (1992); Osapay et al., J. Med. Chem. 40: 2241-2251 (1997); Fukase et al., Bull. Chem. Soc. Jpn. 65: 2227-2240 (1992); Harpp et al., J. Org. Chem. 36: 73-80 (1971); Goodman and Shao, Pure Appl. Chem. 68: 1303-1308 (1996); and Osapay and Goodman, J. Chem. Soc. Chem. Commun. 1599-1600 (1993).

[0365] In some embodiments, α, ω-diaminoalkane tethers, e.g., 1,4-diaminopropane and 1,5-diaminopentane) between two Glu residues at positions i and i+7 are used to stabilize the alpha helix of Q. Such tethers lead to the formation of a bridge of 9-atoms or more in length, depending on the length of the diaminoalkane tether. Suitable methods of producing peptides cross-linked with such tethers are described in the art. See, for example, Phelan et al., J. Am. Chem. Soc. 119: 455-460 (1997).

[0366] In yet another embodiment of the invention, a disulfide bridge is used to cross-link one or two turns of the alpha helix of Q. Alternatively, a modified disulfide bridge in which one or both sulfur atoms are replaced by a methylene group resulting in an isosteric macrocyclization is used to stabilize the alpha helix of Q. Suitable methods of modifying peptides with disulfide bridges or sulfur-based cyclization are described in, for example, Jackson et al., J. Am. Chem. Soc. 113: 9391-9392 (1991) and Rudinger and Jost, Experientia 20: 570-571 (1964).

[0367] In yet another embodiment, the alpha helix of Q is stabilized via the binding of metal atom by two His residues or a His and Cys pair positioned at i and i+4. The metal atom can be, for example, Ru(III), Cu(II), Zn(II), or Cd(II). Such methods of metal binding-based alpha helix stabilization are known in the art. See, for example, Andrews and Tabor, Tetrahedron 55: 11711-11743 (1999); Ghadiri et al., J. Am. Chem. Soc. 112: 1630-1632 (1990); and Ghadiri et al., J. Am. Chem. Soc. 119: 9063-9064 (1997).

[0368] The alpha helix of Q can alternatively be stabilized through other means of peptide cyclizing, which means are reviewed in Davies, J. Peptide. Sci. 9: 471-501 (2003). The alpha helix can be stabilized via the formation of an amide bridge, thioether bridge, thioester bridge, urea bridge, carbamate bridge, sulfonamide bridge, and the like. For example, a thioester bridge can be formed between the C-terminus and the side chain of a Cys residue. Alternatively, a thioester can be formed via side chains of amino acids having a thiol (Cys) and a carboxylic acid (e.g., Asp, Glu). In another method, a cross-linking agent, such as a dicarboxylic acid, e.g. suberic acid (octanedioic acid), etc. can introduce a link between two functional groups of an amino acid side chain, such as a free amino, hydroxyl, thiol group, and combinations thereof.

[0369] In accordance with some embodiments, the alpha helix of Q is stabilized through the incorporation of hydrophobic amino acids at positions i and i+4. For instance, i can be Tyr and i+4 can be either Val or Leu; i can be Phe and i+4 can be Cys or Met; I can be Cys and i+4 can be Met; or i can be Phe and i+4 can be Ile. It should be understood that, for purposes herein, the above amino acid pairings can be reversed, such that the indicated amino acid at position i could alternatively be located at i+4, while the i+4 amino acid can be located at the i position.

[0370] In accordance with other embodiments of the invention, wherein Q is a glucagon related peptide, the alpha helix is stabilized through incorporation (either by amino acid substitution or insertion) of one or more alpha helix-stabilizing amino acids at the C-terminal portion of Q (around amino acids 12-29 according to the numbering of the amino acid numbering of wild type glucagon). In a specific embodiment, the alpha helix-stabilizing amino acid is an α, α-disubstituted amino acid, including, but not limited to any of amino iso-butyric acid (Aib), an amino acid disubstituted with the same or a different group selected from methyl, ethyl, propyl, and n-butyl, or with a cyclooctane or cycloheptane (e.g., 1-aminocyclooctane-1-carboxylic acid). In some embodiments, one, two, three, four or more of positions 16, 17, 18, 19, 20, 21, 24 or 29 of the glucagon related peptide is substituted with an α, α-disubstituted amino acid. In a specific embodiment, one, two, three or all of positions 16, 20, 21, and 24 are substituted with Aib.

### Conjugates

[0371] In some embodiments, the peptides (Q) described herein are glycosylated, amidated, carboxylated, phosphorylated, esterified, N-acylated, cyclized via, e.g., a disulfide bridge, or converted into a salt (e.g., an acid addition salt, a basic addition salt), and/or optionally dimerized, multimerized, or polymerized, or conjugated. As described herein, Q can be a glucagon superfamily peptide, glucagon related peptide, including a Class 1, 2, 3, 4 or 5 glucagon related peptide, or osteocalcin, calcitonin, amylin, or an analog, derivative or conjugate thereof.

[0372] The present disclosure also encompasses conjugates in which Q of Q-L-Y is further linked to a heterologous moiety. The conjugation between Q and the heterologous moiety can be through covalent bonding, non-covalent bonding (e.g. electrostatic interactions, hydrogen bonds, van der Waals interactions, salt bridges, hydrophobic interactions, and the like), or both types of bonding. A variety of non-covalent coupling systems may be used, including biotin-avidin, ligand/receptor, enzyme/substrate, nucleic acid/nucleic acid binding protein, lipid/lipid binding protein, cellular adhesion molecule partners; or any binding partners or fragments thereof which have affinity for each other. In some aspects, the covalent bonds are peptide bonds. The conjugation of Q to the heterologous moiety may be indirect or direct conjugation, the former of which may involve a linker or spacer. Suitable linkers and spacers are known in the art and include, but not limited to, any of the linkers or spacers described herein under the sections “Acylation and alkylation” and “The Linking Group,” and in the subsection “Chemical Modification of Q and/or L.”

[0373] As used herein, the term “heterologous moiety” is synonymous with the term “conjugate moiety” and refers to any molecule (chemical or biochemical, naturally-occurring or non-coded) which is different from Q to which it is attached. Exemplary conjugate moieties that can be linked to Q include but are not limited to a heterologous peptide or polypeptide (including for example, a plasma protein), a targeting agent, an immunoglobulin or portion thereof (e.g., variable region, CDR, or Fc region), a diagnostic label such as a radioisotope, fluorophore or enzymatic label, a polymer including water soluble polymers, or other therapeutic or diagnostic agents. In some embodiments a conjugate is provided comprising Q and a plasma protein, wherein the plasma protein is selected from the group consisting of albumin, transferin, fibrinogen and globulins. In some embodiments the plasma protein moiety of the conjugate is albumin or transferin. The conjugate in some embodiments comprises Q and one or more of a polypeptide, a nucleic acid molecule, an antibody or fragment thereof, a polymer, a quantum dot, a small molecule (molecular weight less than 1000 daltons), a toxin, a diagnostic agent, a carbohydrate, an amino acid.

[0374] C-Terminal Heterologous Moiety

[0375] In some embodiments, the heterologous moiety conjugated to Q is a peptide which is distinct from Q and the conjugate is a fusion peptide or a chimeric peptide. In some embodiments, where Q is a glucagon superfamily peptide, the heterologous moiety is a peptide extension of 1-21 amino acids. In specific embodiments, where Q is a glucagon related peptide (e.g. a Class 1, 2, 3, 4 or 5 glucagon related peptide), the extension is attached to the C-terminus of Q, e.g., to amino acid at position 29. In some embodiments, the extension comprises an amino acid sequence of SEQ ID NO: 1610 (GPSSGAPPPS), SEQ ID NO: 1611 (GGPSSGAPPPS-CONH₂), SEQ ID NO: 1614 (KRNRNNIA), SEQ ID NO: 1643 (KRNR), or KGKKNDWKHNITQ (SEQ ID NO: 1613). In specific aspects, the amino acid sequence is attached through the C-terminal amino acid of Q, e.g., amino acid at position 29. In some embodiments, the amino acid sequence of SEQ ID NOs: 1610, 1611, 1613, 1614 and 1643 is bound to amino acid 29 of the peptide through a peptide bond. In some specific embodiments, the amino acid at position 29 of the glucagon related peptide (e.g. a Class 1, 2, 3, 4 or 5 glucagon related peptide) is a Gly and the Gly is fused to one of the amino acid sequences of SEQ ID NOs: 1610, 1611, 1613, 1614 and 1643.

[0376] Polymer Heterologous Moiety

[0377] In some embodiments, the heterologous moiety conjugated to Q is a polymer. In some embodiments, the polymer is selected from the group consisting of: polyamides, polycarbonates, polyalkylenes and derivatives thereof including, polyalkylene glycols, polyalkylene oxides, polyalkylene terepthalates, polymers of acrylic and methacrylic esters, including poly(methyl methacrylate), poly(ethyl methacrylate), poly(butylmethacrylate), poly(isobutyl methacrylate), poly(hexylmethacrylate), poly(isodecyl methacrylate), poly(lauryl methacrylate), poly(phenyl methacrylate), poly(methyl acrylate), poly(isopropyl acrylate), poly(isobutyl acrylate), and poly(octadecyl acrylate), polyvinyl polymers including polyvinyl alcohols, polyvinyl ethers, polyvinyl esters, polyvinyl halides, poly(vinyl acetate), and polyvinylpyrrolidone, polyglycolides, polysiloxanes, polyurethanes and co-polymers thereof, celluloses including alkyl cellulose, hydroxyalkyl celluloses, cellulose ethers, cellulose esters, nitro celluloses, methyl cellulose, ethyl cellulose, hydroxypropyl cellulose, hydroxy-propyl methyl cellulose, hydroxybutyl methyl cellulose, cellulose acetate, cellulose propionate, cellulose acetate butyrate, cellulose acetate phthalate, carboxylethyl cellulose, cellulose triacetate, and cellulose sulphate sodium salt, polypropylene, polyethylenes including poly(ethylene glycol), poly(ethylene oxide), and poly(ethylene terephthalate), and polystyrene.

[0378] In some aspects, the polymer is a biodegradable polymer, including a synthetic biodegradable polymer (e.g., polymers of lactic acid and glycolic acid, polyanhydrides, poly(ortho)esters, polyurethanes, poly(butic acid), poly(valeric acid), and poly(lactide-cocaprolactone)), and a natural biodegradable polymer (e.g., alginate and other polysaccharides including dextran and cellulose, collagen, chemical derivatives thereof (substitutions, additions of chemical groups, for example, alkyl, alkylene, hydroxylations, oxidations, and other modifications routinely made by those skilled in the art), albumin and other hydrophilic proteins (e.g., zein and other prolamines and hydrophobic proteins)), as well as any copolymer or mixture thereof. In general, these materials degrade either by enzymatic hydrolysis or exposure to water in vivo, by surface or bulk erosion.

[0379] In some aspects, the polymer is a bioadhesive polymer, such as a bioerodible hydrogel described by H. S. Sawhney, C. P. Pathak and J. A. Hubbell in Macromolecules, 1993, 26, 581-587, the teachings of which are incorporated herein, polyhyaluronic acids, casein, gelatin, glutin, polyanhydrides, polyacrylic acid, alginate, chitosan, poly(methyl methacrylates), poly(ethyl methacrylates), poly(butylmethacrylate), poly(isobutyl methacrylate), poly(hexylmethacrylate), poly(isodecyl methacrylate), poly(lauryl methacrylate), poly(phenyl methacrylate), poly(methyl acrylate), poly(isopropyl acrylate), poly(isobutyl acrylate), and poly(octadecyl acrylate).

[0380] In some embodiments, the polymer is a water-soluble polymer or a hydrophilic polymer. Hydrophilic polymers are further described herein under “Hydrophilic Heterologous Moieties.” Suitable water-soluble polymers are known in the art and include, for example, polyvinylpyrrolidone, hydroxypropyl cellulose (HPC; Klucel), hydroxypropyl methylcellulose (HPMC; Methocel), nitrocellulose, hydroxypropyl ethylcellulose, hydroxypropyl butylcellulose, hydroxypropyl pentylcellulose, methyl cellulose, ethylcellulose (Ethocel), hydroxyethyl cellulose, various alkyl celluloses and hydroxyalkyl celluloses, various cellulose ethers, cellulose acetate, carboxymethyl cellulose, sodium carboxymethyl cellulose, calcium carboxymethyl cellulose, vinyl acetate/crotonic acid copolymers, poly-hydroxyalkyl methacrylate, hydroxymethyl methacrylate, methacrylic acid copolymers, polymethacrylic acid, polymethylmethacrylate, maleic anhydride/methyl vinyl ether copolymers, poly vinyl alcohol, sodium and calcium polyacrylic acid, polyacrylic acid, acidic carboxy polymers, carboxypolymethylene, carboxyvinyl polymers, polyoxyethylene polyoxypropylene copolymer, polymethylvinylether co-maleic anhydride, carboxymethylamide, potassium methacrylate divinylbenzene co-polymer, polyoxyethyleneglycols, polyethylene oxide, and derivatives, salts, and combinations thereof.

[0381] In specific embodiments, the polymer is a polyalkylene glycol, including, for example, polyethylene glycol (PEG).

[0382] In some embodiments, the heterologous moiety is a carbohydrate. In some embodiments, the carbohydrate is a monosaccharide (e.g., glucose, galactose, fructose), a disaccharide (e.g., sucrose, lactose, maltose), an oligosaccharide (e.g., raffinose, stachyose), a polysaccharide (a starch, amylase, amylopectin, cellulose, chitin, callose, laminarin, xylan, mannan, fucoidan, galactomannan.

[0383] In some embodiments, the heterologous moiety is a lipid. The lipid, in some embodiments, is a fatty acid, eicosanoid, prostaglandin, leukotriene, thromboxane, N-acyl ethanolamine), glycerolipid (e.g., mono-, di-, tri-substituted glycerols), glycerophospholipid (e.g., phosphatidylcholine, phosphatidylinositol, phosphatidylethanolamine, phosphatidylserine), sphingolipid (e.g., sphingosine, ceramide), sterol lipid (e.g., steroid, cholesterol), prenol lipid, saccharolipid, or a polyketide, oil, wax, cholesterol, sterol, fat-soluble vitamin, monoglyceride, diglyceride, triglyceride, a phospholipid.

[0384] Fc Fusion Heterologous Moiety

[0385] As noted above, in some embodiments Q is conjugated, e.g., fused to an immunoglobulin or portion thereof (e.g. variable region, CDR, or Fc region). As described herein, Q can be a glucagon superfamily peptide, glucagon related peptide, including a Class 1, 2, 3, 4 or 5 glucagon related peptide, or osteocalcin, calcitonin, amylin, or an analog, derivative or conjugate thereof. Known types of immunoglobulins (Ig) include IgG, IgA, IgE, IgD or IgM. The Fc region is a C-terminal region of an Ig heavy chain, which is responsible for binding to Fc receptors that carry out activities such as recycling (which results in prolonged half-life), antibody dependent cell-mediated cytotoxicity (ADCC), and complement dependent cytotoxicity (CDC).

[0386] For example, according to some definitions the human IgG heavy chain Fc region stretches from Cys226 to the C-terminus of the heavy chain. The “hinge region” generally extends from Glu216 to Pro230 of human IgG1 (hinge regions of other IgG isotypes may be aligned with the IgG1 sequence by aligning the cysteines involved in cysteine bonding). The Fc region of an IgG includes two constant domains, CH2 and CH3. The CH2 domain of a human IgG Fc region usually extends from amino acids 231 to amino acid 341. The CH3 domain of a human IgG Fc region usually extends from amino acids 342 to 447. References made to amino acid numbering of immunoglobulins or immunoglobulin fragments, or regions, are all based on Kabat et al. 1991, Sequences of Proteins of Immunological Interest, U.S. Department of Public Health, Bethesda, Md. In a related embodiment, the Fc region may comprise one or more native or modified constant regions from an immunoglobulin heavy chain, other than CH1, for example, the CH2 and CH3 regions of IgG and IgA, or the CH3 and CH4 regions of IgE.

[0387] Suitable conjugate moieties include portions of immunoglobulin sequence that include the FcRn binding site. FcRn, a salvage receptor, is responsible for recycling immunoglobulins and returning them to circulation in blood. The region of the Fc portion of IgG that binds to the FcRn receptor has been described based on X-ray crystallography (Burmeister et al. 1994, Nature 372:379). The major contact area of the Fc with the FcRn is near the junction of the CH2 and CH3 domains. Fc-FcRn contacts are all within a single Ig heavy chain. The major contact sites include amino acid residues 248, 250-257, 272, 285, 288, 290-291, 308-311, and 314 of the CH2 domain and amino acid residues 385-387, 428, and 433-436 of the CH3 domain.

[0388] Some conjugate moieties may or may not include FcγR binding site(s). FcγR are responsible for ADCC and CDC. Examples of positions within the Fc region that make a direct contact with FcγR are amino acids 234-239 (lower hinge region), amino acids 265-269 (B/C loop), amino acids 297-299 (C′/E loop), and amino acids 327-332 (F/G) loop (Sondermann et al., Nature 406: 267-273, 2000). The lower hinge region of IgE has also been implicated in the FcRI binding (Henry, et al., Biochemistry 36, 15568-15578, 1997). Residues involved in IgA receptor binding are described in Lewis et al., (J. Immunol. 175:6694-701, 2005) Amino acid residues involved in IgE receptor binding are described in Sayers et al. (J Biol. Chem. 279(34):35320-5, 2004).

[0389] Amino acid modifications may be made to the Fc region of an immunoglobulin. Such variant Fc regions comprise at least one amino acid modification in the CH3 domain of the Fc region (residues 342-447) and/or at least one amino acid modification in the CH2 domain of the Fc region (residues 231-341). Mutations believed to impart an increased affinity for FcRn include T256A, T307A, E380A, and N434A (Shields et al. 2001, J. Biol. Chem. 276:6591). Other mutations may reduce binding of the Fc region to FcγRI, FcγRIIA, FcγRIIB, and/or FcγRIIIA without significantly reducing affinity for FcRn. For example, substitution of the Asn at position 297 of the Fc region with Ala or another amino acid removes a highly conserved N-glycosylation site and may result in reduced immunogenicity with concomitant prolonged half-life of the Fc region, as well as reduced binding to FcγRs (Routledge et al. 1995, Transplantation 60:847; Friend et al. 1999, Transplantation 68:1632; Shields et al. 1995, J. Biol. Chem. 276:6591) Amino acid modifications at positions 233-236 of IgG1 have been made that reduce binding to FcγRs (Ward and Ghetie 1995, Therapeutic Immunology 2:77 and Armour et al. 1999, Eur. J. Immunol. 29:2613). Some exemplary amino acid substitutions are described in U.S. Pat. Nos. 7,355,008 and 7,381,408, each incorporated by reference herein in its entirety.

[0390] Hydrophilic Heterologous Moiety

[0391] In some embodiments, Q described herein is covalently bonded to a hydrophilic moiety. As described herein, Q can be a glucagon superfamily peptide, glucagon related peptide, including a Class 1, 2, 3, 4 or 5 glucagon related peptide, or osteocalcin, calcitonin, amylin, or an analog, derivative or conjugate thereof. Hydrophilic moieties can be attached to Q under any suitable conditions used to react a protein with an activated polymer molecule. Any means known in the art can be used, including via acylation, reductive alkylation, Michael addition, thiol alkylation or other chemoselective conjugation/ligation methods through a reactive group on the PEG moiety (e.g., an aldehyde, amino, ester, thiol, α-haloacetyl, maleimido or hydrazino group) to a reactive group on the target compound (e.g., an aldehyde, amino, ester, thiol, α-haloacetyl, maleimido or hydrazino group). Activating groups which can be used to link the water soluble polymer to one or more proteins include without limitation sulfone, maleimide, sulfhydryl, thiol, triflate, tresylate, azidirine, oxirane, 5-pyridyl, and alpha-halogenated acyl group (e.g., alpha-iodo acetic acid, alpha-bromoacetic acid, alpha-chloroacetic acid). If attached to the peptide by reductive alkylation, the polymer selected should have a single reactive aldehyde so that the degree of polymerization is controlled. See, for example, Kinstler et al., Adv. Drug. Delivery Rev. 54: 477-485 (2002); Roberts et al., Adv. Drug Delivery Rev. 54: 459-476 (2002); and Zalipsky et al., Adv. Drug Delivery Rev. 16: 157-182 (1995).

[0392] Further activating groups which can be used to link the hydrophilic moiety (water soluble polymer) to a protein include an alpha-halogenated acyl group (e.g., alpha-iodo acetic acid, alpha-bromoacetic acid, alpha-chloroacetic acid). In specific aspects, an amino acid residue of the peptide having a thiol is modified with a hydrophilic moiety such as PEG. In some embodiments, an amino acid on Q comprising a thiol is modified with maleimide-activated PEG in a Michael addition reaction to result in a PEGylated peptide comprising the thioether linkage shown below:

[chemical structure]

[0393] In some embodiments, the thiol of an amino acid of Q is modified with a haloacetyl-activated PEG in a nucleophilic substitution reaction to result in a PEGylated peptide comprising the thioether linkage shown below:

[chemical structure]

[0394] Suitable hydrophilic moieties include polyethylene glycol (PEG), polypropylene glycol, polyoxyethylated polyols (e.g., POG), polyoxyethylated sorbitol, polyoxyethylated glucose, polyoxyethylated glycerol (POG), polyoxyalkylenes, polyethylene glycol propionaldehyde, copolymers of ethylene glycol/propylene glycol, monomethoxy-polyethylene glycol, mono-(C1-C10) alkoxy- or aryloxy-polyethylene glycol, carboxymethylcellulose, polyacetals, polyvinyl alcohol (PVA), polyvinyl pyrrolidone, poly-1,3-dioxolane, poly-1,3,6-trioxane, ethylene/maleic anhydride copolymer, poly (.beta.-amino acids) (either homopolymers or random copolymers), poly(n-vinyl pyrrolidone)polyethylene glycol, propropylene glycol homopolymers (PPG) and other polyakylene oxides, polypropylene oxide/ethylene oxide copolymers, colonic acids or other polysaccharide polymers, Ficoll or dextran and mixtures thereof. Dextrans are polysaccharide polymers of glucose subunits, predominantly linked by α1-6 linkages. Dextran is available in many molecular weight ranges, e.g., about 1 kD to about 100 kD, or from about 5, 10, 15 or 20 kD to about 20, 30, 40, 50, 60, 70, 80 or 90 kD.

[0395] The hydrophilic moiety, e.g., polyethylene glycol chain, in accordance with some embodiments has a molecular weight selected from the range of about 500 to about 40,000 Daltons. In some embodiments the polyethylene glycol chain has a molecular weight selected from the range of about 500 to about 5,000 Daltons, or about 1,000 to about 5,000 Daltons. In another embodiment the hydrophilic moiety, e.g., polyethylene glycol chain, has a molecular weight of about 10,000 to about 20,000 Daltons. In yet other exemplary embodiments the hydrophilic moiety, e.g. polyethylene glycol chain, has a molecular weight of about 20,000 to about 40,000 Daltons.

[0396] Linear or branched hydrophilic polymers are contemplated. Resulting preparations of conjugates may be essentially monodisperse or polydisperse, and may have about 0.5, 0.7, 1, 1.2, 1.5 or 2 polymer moieties per peptide.

[0397] In some embodiments, the native amino acid of the peptide is substituted with an amino acid having a side chain suitable for crosslinking with hydrophilic moieties, to facilitate linkage of the hydrophilic moiety to the peptide. Exemplary amino acids include Cys, Lys, Orn, homo-Cys, or acetyl phenylalanine (Ac-Phe). In other embodiments, an amino acid modified to comprise a hydrophilic group is added to the peptide at the C-terminus

[0398] In some embodiments, the peptide of the conjugate is conjugated to a hydrophilic moiety, e.g. PEG, via covalent linkage between a side chain of an amino acid of the peptide and the hydrophilic moiety. In some embodiments, where Q is a Class 1, 2, 3, 4 or 5 glucagon-related peptide, the peptide is conjugated to a hydrophilic moiety via the side chain of an amino acid at position 16, 17, 21, 24, 29, 40, a position within a C-terminal extension, or the C-terminal amino acid, or a combination of these positions. In some aspects, the amino acid covalently linked to a hydrophilic moiety (e.g., the amino acid comprising a hydrophilic moiety) is a Cys, Lys, Orn, homo-Cys, or Ac-Phe, and the side chain of the amino acid is covalently bonded to a hydrophilic moiety (e.g., PEG).

[0399] rPEG Heterologous Moiety

[0400] In some embodiments, the conjugate of the invention comprises a Q fused to an accessory peptide which is capable of forming an extended conformation similar to chemical PEG (e.g., a recombinant PEG (rPEG) molecule), such as those described in International Patent Application Publication No. WO2009/023270 and U.S. Patent Application Publication No. US2008/0286808. The rPEG molecule is not polyethylene glycol. The rPEG molecule in some aspects is a polypeptide comprising one or more of glycine, serine, glutamic acid, aspartic acid, alanine, or proline. In some aspects, the rPEG is a homopolymer, e.g., poly-glycine, poly-serine, poly-glutamic acid, poly-aspartic acid, poly-alanine, or poly-proline. In other embodiments, the rPEG comprises two types of amino acids repeated, e.g., poly(Gly-Ser), poly(Gly-Glu), poly(Gly-Ala), poly(Gly-Asp), poly(Gly-Pro), poly(Ser-Glu), etc. In some aspects, the rPEG comprises three different types of amino acids, e.g., poly(Gly-Ser-Glu). In specific aspects, the rPEG increases the half-life of Q. In some aspects, the rPEG comprises a net positive or net negative charge. The rPEG in some aspects lacks secondary structure. In some embodiments, the rPEG is greater than or equal to 10 amino acids in length and in some embodiments is about 40 to about 50 amino acids in length. The accessory peptide in some aspects is fused to the N- or C-terminus of the peptide of the invention through a peptide bond or a proteinase cleavage site, or is inserted into the loops of the peptide of the invention. The rPEG in some aspects comprises an affinity tag or is linked to a PEG that is greater than 5 kDa. In some embodiments, the rPEG confers the conjugate of the invention with an increased hydrodynamic radius, serum half-life, protease resistance, or solubility and in some aspects confers the conjugate with decreased immunogenicity.

[0401] Q can be linked to conjugate moieties via direct covalent linkage by reacting targeted amino acid residues of the peptide with an organic derivatizing agent that is capable of reacting with selected side chains or the N- or C-terminal residues of these targeted amino acids. Reactive groups on the peptide or conjugate moiety include, e.g., an aldehyde, amino, ester, thiol, α-haloacetyl, maleimido or hydrazino group. Derivatizing agents include, for example, maleimidobenzoyl sulfosuccinimide ester (conjugation through cysteine residues), N-hydroxysuccinimide (through lysine residues), glutaraldehyde, succinic anhydride or other agents known in the art. Alternatively, the conjugate moieties can be linked to the peptide indirectly through intermediate carriers, such as polysaccharide or polypeptide carriers. Examples of polysaccharide carriers include aminodextran. Examples of suitable polypeptide carriers include polylysine, polyglutamic acid, polyaspartic acid, co-polymers thereof, and mixed polymers of these amino acids and others, e.g., serines, to confer desirable solubility properties on the resultant loaded carrier.

[0402] Multimers

[0403] With regard to the Class 1, Class 2, and Class 3 glucagon related peptides, Q may be part of a dimer, trimer or higher order multimer comprising at least two, three, or more peptides bound via a linker, wherein at least one or both peptides is a glucagon related peptide. The dimer may be a homodimer or heterodimer. In some embodiments, the linker is selected from the group consisting of a bifunctional thiol crosslinker and a bi-functional amine crosslinker. In certain embodiments, the linker is PEG, e.g., a 5 kDa PEG, 20 kDa PEG. In some embodiments, the linker is a disulfide bond. For example, each monomer of the dimer may comprise a Cys residue (e.g., a terminal or internally positioned Cys) and the sulfur atom of each Cys residue participates in the formation of the disulfide bond. In some aspects of the invention, the monomers are connected via terminal amino acids (e.g., N-terminal or C-terminal), via internal amino acids, or via a terminal amino acid of at least one monomer and an internal amino acid of at least one other monomer. In specific aspects, the monomers are not connected via an N-terminal amino acid. In some aspects, the monomers of the multimer are attached together in a “tail-to-tail” orientation in which the C-terminal amino acids of each monomer are attached together. A conjugate moiety may be covalently linked to any of the glucagon related peptides described herein, including a dimer, trimer or higher order multimer.

### Conjugation of the Heterologous Moiety to Q

[0404] The heterologous moiety is conjugated to peptide (Q) according to linkage and conjugation methods described in the “Linking Group” section and “Chemical Modification of Q and/or Y subsection.”

### Methods for Making Q

[0405] The peptides (Q) disclosed herein may be prepared by standard synthetic methods, recombinant DNA techniques, or any other methods of preparing peptides and fusion proteins. Although certain non-natural amino acids cannot be expressed by standard recombinant DNA techniques, techniques for their preparation are known in the art. Compounds of this invention that encompass non-peptide portions may be synthesized by standard organic chemistry reactions, in addition to standard peptide chemistry reactions when applicable.

[0406] The peptides of the disclosure can be obtained by methods known in the art. Suitable methods of de novo synthesizing peptides are described in, for example, Chan et al., Fmoc Solid Phase Peptide Synthesis, Oxford University Press, Oxford, United Kingdom, 2005; Peptide and Protein Drug Analysis, ed. Reid, R., Marcel Dekker, Inc., 2000; Epitope Mapping, ed. Westwood et al., Oxford University Press, Oxford, United Kingdom, 2000; and U.S. Pat. No. 5,449,752.

[0407] Also, in the instances in which the peptides of the disclosure do not comprise any non-coded or non-natural amino acids, the peptide can be recombinantly produced using a nucleic acid encoding the amino acid sequence of the peptide using standard recombinant methods. See, for instance, Sambrook et al., Molecular Cloning: A Laboratory Manual. 3rd ed., Cold Spring Harbor Press, Cold Spring Harbor, N.Y. 2001; and Ausubel et al., Current Protocols in Molecular Biology, Greene Publishing Associates and John Wiley & Sons, NY, 1994.

[0408] In some embodiments, the peptides of the disclosure are isolated. In some embodiments, the peptides of the disclosure are purified. It is recognized that “purity” is a relative term, and not to be necessarily construed as absolute purity or absolute enrichment or absolute selection. In some aspects, the purity is at least or about 50%, is at least or about 60%, at least or about 70%, at least or about 80%, or at least or about 90% (e.g., at least or about 91%, at least or about 92%, at least or about 93%, at least or about 94%, at least or about 95%, at least or about 96%, at least or about 97%, at least or about 98%, at least or about 99% or is approximately 100%.

[0409] In some embodiments, the peptides described herein are commercially synthesized by companies, such as Synpep (Dublin, Calif.), Peptide Technologies Corp. (Gaithersburg, Md.), and Multiple Peptide Systems (San Diego, Calif.). In this respect, the peptides can be synthetic, recombinant, isolated, and/or purified.

[0410] Classes of glucagon related peptides (Q) are described in detail below. With respect to each of the sections of disclosure concerning Class 1, Class 2, Class 3, Class 4, and Class 5 glucagon related peptides, modifications are described with respect to the glucagon related peptide portion (Q) of a Q-L-Y conjugate detailed above. Thus, structural elements described with regard to a class of glucagon related peptides are structural elements of Q which is then further modified to generate the Q-L-Y conjugate as described above.

### Class 1 Glucagon Related Peptides

[0411] In certain embodiments, the glucagon related peptide is a Class 1 glucagon related peptide, which is described herein and in International Patent Publication No. WO 2009/155257 (published on Dec. 23, 2009), International Patent Application Publication No. WO 2008/086086 (published on Jul. 17, 2008), and International Patent Application Publication No. WO 2007/056362 (published on May 18, 2007), the contents of which are incorporated by reference in their entirety.

[0412] The biological sequences referenced in the following section (SEQ ID NOs: 801-915) relating to Class 1 glucagon related peptides correspond to SEQ ID NOs: 1-115 in International International Patent Publication No. WO 2009/155257.

### Activity

[0413] Class 1 glucagon peptides retain glucagon receptor activity relative to the native glucagon peptide (SEQ ID NO: 801). For example, the glucagon peptide can retain at least 10%, 20%, 30%, 40%, 50%, 60%, 70%, 75% activity, 80% activity, 85% activity, or 90% of the activity of native glucagon (calculated as the inverse ratio of EC₅₀s for the glucagon peptide vs. glucagon, e.g., as measured by cAMP production using the assay generally described in Example 2). In some embodiments, the Class 1 glucagon related peptides have the same or greater activity (used synonymously with the term “potency” herein) than glucagon. In some embodiments, the glucagon peptides described herein exhibit no more than about 100%, 1000%, 10,000%, 100,000%, or 1,000,000% of the activity of native glucagon peptide.

[0414] Any of the Class 1 glucagon related peptides described herein may exhibit an EC₅₀ at the human glucagon receptor of about 100 nM, 75 nM, 50 nM, 40 nM, 30 nM, 20 nM, 10 nM, 5 nM, 1 nM or less when tested for cAMP induction in HEK293 cells over-expressing glucagon receptor, e.g. using the assay of Example 2. Typically pegylated peptides will exhibit a higher EC₅₀ compared to the unpegylated peptide. For example, the Class 1 glucagon related peptides described herein, when unpegylated, may exhibit activity at the glucagon receptor which is at least 20% (e.g., at least 30%, at least 40%, at least 50%, at least 60%, at least 75%, at least 80%, at least 90% at least 95%, at least 98%, at least 99%, 100%, 150%, 200%, 400%, 500% or more) of the activity of native glucagon (SEQ ID NO: 801) at the glucagon receptor. In certain embodiments, the Class 1 glucagon related peptides described herein exhibit the indicated % activity of native glucagon at the glucagon receptor, when lacking a hydrophilic moiety, but exhibit a decreased % activity of native glucagon at the glucagon receptor, when comprising a hydrophilic moiety. For example, the Class 1 glucagon related peptides described herein, when pegylated, may exhibit activity at the glucagon receptor which is at least 2% (e.g. at least 3%, at least 4%, at least 5%, at least 6%, at least 7%, at least 8%, at least 9%, or at least 10% of the activity of native glucagon. In some embodiments, the Class 1 glucagon related peptides described herein may exhibit any of the above indicated activities but no more than 1000%, 10,000%, 100,000%, or 1,000,000% of the activity of native glucagon at the glucagon receptor.

[0415] In some embodiments, the Class 1 glucagon related peptides exhibit less than about 5%, 4%, 3%, 2% or 1% of the activity of native GLP-1 at the GLP-1 receptor and/or a greater than about 5-fold, 10-fold, or 15-fold selectivity for glucagon receptor compared to GLP-1 receptor. For example, in some embodiments, the Class 1 glucagon related peptides exhibit less than 5% of the activity of native GLP-1 at the GLP-1 receptor and exhibit a greater than 5-fold selectivity for glucagon receptor compared to GLP-1 receptor.

### Improved Solubility

[0416] Native glucagon exhibits poor solubility in aqueous solution, particularly at physiological pH, with a tendency to aggregate and precipitate over time. In contrast, the Class 1 glucagon related peptides in some embodiments exhibit at least 2-fold, 5-fold, or even higher solubility compared to native glucagon at a pH between 6 and 8, or between 6 and 9, for example, at pH 7 after 24 hours at 25° C.

[0417] Accordingly, in some embodiments, a Class 1 glucagon related peptide has been modified relative to the wild type peptide of His-Ser-Gln-Gly-Thr-Phe-Thr-Ser-Asp-Tyr-Ser-Lys-Tyr-Leu-Asp-Ser-Arg-Arg-Ala-Gln-Asp-Phe-Val-Gln-Trp-Leu-Met-Asn-Thr (SEQ ID NO: 801) to improve the peptides solubility in aqueous solutions, particularly at a pH ranging from about 5.5 to about 8.0, while retaining the native peptide's biological activity.

[0418] For example, the solubility of any of the Class 1 glucagon related peptides described herein can be further improved by attaching a hydrophilic moiety to the peptide. Introduction of such groups also increases duration of action, e.g. as measured by a prolonged half-life in circulation. Hydrophilic moieties are further described herein.

Modification with Charged Residues

[0419] In some embodiments, solubility is improved by adding charge to the Class 1 glucagon related peptide by the substitution of native non-charged amino acids with charged amino acids selected from the group consisting of lysine, arginine, histidine, aspartic acid and glutamic acid, or by the addition of charged amino acids to the amino or carboxy terminus of the peptide.

[0420] In accordance with some embodiments, the Class 1 glucagon related peptide has improved solubility due to the fact that the peptide is modified by amino acid substitutions and/or additions that introduce a charged amino acid into the C-terminal portion of the peptide, and in some embodiments at a position C-terminal to position 27 of SEQ ID NO: 801. Optionally, one, two or three charged amino acids may be introduced within the C-terminal portion, and in some embodiments C-terminal to position 27. In accordance with some embodiments, the native amino acid(s) at positions 28 and/or 29 are substituted with a charged amino acid, and/or one to three charged amino acids are added to the C-terminus of the peptide, e.g. after position 27, 28 or 29. In exemplary embodiments, one, two, three or all of the charged amino acids are negatively charged. In other embodiments, one, two, three or all of the charged amino acids are positively charged.

[0421] In specific exemplary embodiments, the Class 1 glucagon related peptide may comprise any one or two of the following modifications: substitution of N28 with E; substitution of N28 with D; substitution of T29 with D; substitution of T29 with E; insertion of E after position 27, 28 or 29; insertion of D after position 27, 28 or 29. For example, D28E29, E28E29, E29E30, E28E30, D28E30.

[0422] In accordance with one exemplary embodiment, the Class 1 glucagon related peptide comprises an amino acid sequence of SEQ ID NO: 811, or an analog thereof that contains 1 to 3 further amino acid modifications (described herein in reference to glucagon agonists) relative to native glucagon, or a glucagon agonist analog thereof. SEQ ID NO: 811 represents a modified Class 1 glucagon related peptide, wherein the asparagine residue at position 28 of the native protein has been substituted with an aspartic acid. In another exemplary embodiment the Class 1 glucagon related peptide comprises an amino acid sequence of SEQ ID NO: 838, wherein the asparagine residue at position 28 of the native protein has been substituted with glutamic acid. Other exemplary embodiments include Class 1 glucagon related peptides of SEQ ID NOs: 824, 825, 826, 833, 835, 836 and 837.

[0423] Substituting the normally occurring amino acid at position 28 and/or 29 with charged amino acids, and/or the addition of one to two charged amino acids at the carboxy terminus of the Class 1 glucagon related peptide, enhances the solubility and stability of the glucagon peptides in aqueous solutions at physiologically relevant pHs (i.e., a pH of about 6.5 to about 7.5) by at least 5-fold and by as much as 30-fold. Accordingly, Class 1 glucagon peptides of some embodiments retain glucagon activity and exhibit at least 2-fold, 5-fold, 10-fold, 15-fold, 25-fold, 30-fold or greater solubility relative to native glucagon at a given pH between about 5.5 and 8, e.g., pH 7, when measured after 24 hours at 25° C.

[0424] Additional modifications, e.g. conservative substitutions, which modifications are further described herein, may be made to the Class 1 glucagon related peptide that still allow it to retain glucagon activity.

### Improved Stability

[0425] Any of the Class 1 glucagon peptides may additionally exhibit improved stability and/or reduced degradation, for example, retaining at least 95% of the original peptide after 24 hours at 25° C. Any of the Class 1 glucagon related peptides disclosed herein may additionally exhibit improved stability at a pH within the range of 5.5 to 8, for example, retaining at least 75%, 80%, 90%, 95%, 96%, 97%, 98% or 99% of the original peptide after 24 hours at 25° C. In some embodiments, the Class 1 glucagon related peptides of the invention exhibit improved stability, such that at least 75% (e.g., at least 80%, at least 85%, at least 90%, at least 95%, more than 95%, up to 100%) of a concentration of the peptide or less than about 25% (e.g., less than 20%, less than 15%, less than 10%, less than 5%, 4%, 3%, 2%, 1%, down to 0%) of degraded peptide is detectable at 280 nm by an ultraviolet (UV) detector after about 1 or more weeks (e.g., about 2 weeks, about 4 weeks, about 1 month, about two months, about four months, about six months, about eight months, about ten months, about twelve months) in solution at a temperature of at least 20° C. (e.g., 21° C., 22° C., 23° C., 24° C., 25° C., 26° C., at least 27.5° C., at least 30° C., at least 35° C., at least 40° C., at least 50° C.) and less than 100° C., less than 85° C., less than 75° C., or less than 70° C. The Class 1 glucagon related peptides may include additional modifications that alter its pharmaceutical properties, e.g. increased potency, prolonged half-life in circulation, increased shelf-life, reduced precipitation or aggregation, and/or reduced degradation, e.g., reduced occurrence of cleavage or chemical modification after storage.

[0426] In yet further exemplary embodiments, any of the foregoing Class 1 glucagon related peptides can be further modified to improve stability by modifying the amino acid at position 15 of SEQ ID NO: 801 to reduce degradation of the peptide over time, especially in acidic or alkaline buffers. In exemplary embodiments, Asp at position 15 is substituted with a Glu, homo-Glu, cysteic acid, or homo-cysteic acid.

[0427] Alternatively, any of the Class 1 glucagon related peptides described herein can be further modified to improve stability by modifying the amino acid at position 16 of SEQ ID NO: 801. In exemplary embodiments, Ser at position 16 is substituted with Thr or Aib, or any of the amino acids substitutions described herein with regard to Class 1 glucagon related peptides which enhance potency at the glucagon receptor. Such modifications reduce cleavage of the peptide bond between Asp15-Ser16.

[0428] In some embodiments, any of the Class 1 glucagon related peptides described herein can be further modified to reduce degradation at various amino acid positions by modifying any one, two, three, or all four of positions 20, 21, 24, or 27. Exemplary embodiments include substitution of Gln at position 20 with Ser, Thr, Ala or Aib, substitution of Asp at position 21 with Glu, substitution of Gln at position 24 with Ala or Aib, substitution of Met at position 27 with Leu or Nle. Removal or substitution of methionine reduces degradation due to oxidation of the methionine. Removal or substitution of Gln or Asn reduces degradation due to deamidation of Gln or Asn. Removal or substitution of Asp reduces degradation that occurs through dehydration of Asp to form a cyclic succinimide intermediate followed by isomerization to iso-aspartate.

### Enhanced Potency

[0429] In accordance with another embodiment, Class 1 glucagon related peptides are provided that have enhanced potency at the glucagon receptor, wherein the peptides comprise an amino acid modification at position 16 of native glucagon (SEQ ID NO: 801). By way of nonlimiting example, such enhanced potency can be provided by substituting the naturally occurring serine at position 16 with glutamic acid or with another negatively charged amino acid having a side chain with a length of 4 atoms, or alternatively with any one of glutamine, homoglutamic acid, or homocysteic acid, or a charged amino acid having a side chain containing at least one heteroatom, (e.g. N, O, S, P) and with a side chain length of about 4 (or 3-5) atoms. Substitution of serine at position 16 with glutamic acid enhances glucagon activity at least 2-fold, 4-fold, 5-fold and up to 10-fold greater at the glucagon receptor. In some embodiments, the Class 1 glucagon related peptide retains selectivity for the glucagon receptor relative to the GLP-1 receptors, e.g., at least 5-fold, 10-fold, or 15-fold selectivity.

### DPP-IV Resistance

[0430] In some embodiments, the Class 1 glucagon peptides disclosed herein are further modified at position 1 or 2 to reduce susceptibility to cleavage by dipeptidyl peptidase IV. More particularly, in some embodiments, position 1 and/or position 2 of the Class 1 glucagon related peptide is substituted with the DPP-IV resistant amino acid(s) described herein. In some embodiments, position 2 of the analog peptide is substituted with an amino isobutyric acid. In some embodiments, position 2 of the analog peptide is substituted with an amino acid selected from the group consisting of D-serine, D-alanine, glycine, N-methyl serine, and ε-amino butyric acid. In another embodiment, position 2 of the Class 1 glucagon related peptide is substituted with an amino acid selected from the group consisting of D-serine, glycine, and aminoisobutyric acid. In some embodiments, the amino acid at position 2 is not D-serine.

[0431] Reduction in glucagon activity upon modification of the amino acids at position 1 and/or position 2 of the glucagon peptide can be restored by stabilization of the alpha-helix structure in the C-terminal portion of the glucagon peptide (around amino acids 12-29). The alpha helix structure can be stabilized by, e.g., formation of a covalent or non-covalent intramolecular bridge (e.g., a lactam bridge between side chains of amino acids at positions “i” and “i+4”, wherein i is an integer from 12 to 25), substitution and/or insertion of amino acids around positions 12-29 with an alpha helix-stabilizing amino acid (e.g., an α,α-disubstituted amino acid), as further described herein.

### Modifications at Position 3

[0432] Glucagon receptor activity can be reduced by an amino acid modification at position 3 (according to the amino acid numbering of wild type glucagon), e.g. substitution of the naturally occurring glutamine at position 3, with an acidic, basic, or a hydrophobic amino acid. For example substitution at position 3 with glutamic acid, ornithine, or norleucine substantially reduces or destroys glucagon receptor activity.

[0433] Maintained or enhanced activity at the glucagon receptor may be achieved by modifying the Gln at position 3 with a glutamine analog as described herein. For example, glucagon agonists can comprise the amino acid sequence of SEQ ID NO: 863, SEQ ID NO: 869, SEQ ID NO: 870, SEQ ID NO: 871, SEQ ID NO: 872, SEQ ID NO: 873, and SEQ ID NO: 874.

Enhancing GLP-1 Activity with C-Terminal Amides and Esters

[0434] Enhanced activity at the GLP-1 receptor is provided by replacing the carboxylic acid of the C-terminal amino acid with a charge-neutral group, such as an amide or ester. Conversely, retaining the native carboxylic acid at the C-terminus of the peptide maintains the relatively greater selectivity of the Class 1 glucagon related peptide for the glucagon receptor vs. the GLP-1 receptor (e.g., greater than about 5, 6, 7, 8, 9, 10, 11, 12, 13, 14, 15, 16, 17, 18, 19, or 20-fold).

### Further Modifications and Combinations

[0435] Additional modifications may be made to the Class 1 glucagon related peptide which may further increase solubility and/or stability and/or glucagon activity. The Class 1 glucagon related peptide may alternatively comprise other modifications that do not substantially affect solubility or stability, and that do not substantially decrease glucagon activity. In exemplary embodiments, the Class 1 glucagon related peptide may comprise a total of up to 11, or up to 12, or up to 13, or up to 14 amino acid modifications relative to the native glucagon sequence. For example, conservative or non-conservative substitutions, additions or deletions may be carried out at any of positions 2, 5, 7, 10, 11, 12, 13, 14, 17, 18, 19, 20, 21, 24, 27, 28 or 29.

[0436] Exemplary modifications of the Class 1 glucagon related peptide include but are not limited to:

[0437] (a) non-conservative substitutions, conservative substitutions, additions or deletions while retaining at least partial glucagon agonist activity, for example, conservative substitutions at one or more of positions 2, 5, 7, 10, 11, 12, 13, 14, 16, 17, 18, 19, 20, 21, 24, 27, 28 or 29, substitution of Tyr at position 10 with Val or Phe, substitution of Lys at position 12 with Arg, substitution of one or more of these positions with Ala;

[0438] (b) deletion of amino acids at positions 29 and/or 28, and optionally position 27, while retaining at least partial glucagon agonist activity;

[0439] (c) modification of the aspartic acid at position 15, for example, by substitution with glutamic acid, homoglutamic acid, cysteic acid or homocysteic acid, which may reduce degradation; or modification of the serine at position 16, for example, by substitution of threonine, Aib, glutamic acid or with another negatively charged amino acid having a side chain with a length of 4 atoms, or alternatively with any one of glutamine, homoglutamic acid, or homocysteic acid, which likewise may reduce degradation due to cleavage of the Asp15-Ser16 bond;

[0440] (d) addition of a hydrophilic moiety such as the water soluble polymer polyethylene glycol, as described herein, e.g. at position 16, 17, 20, 21, 24, 29, 40 or at the C-terminal amino acid, which may increase solubility and/or half-life;

[0441] (e) modification of the methionine at position 27, for example, by substitution with leucine or norleucine, to reduce oxidative degradation;

[0442] (f) modification of the Gln at position 20 or 24, e.g. by substitution with Ser, Thr, Ala or Aib, to reduce degradation that occurs through deamidation of Gln

[0443] (g) modification of Asp at position 21, e.g. by substitution with Glu, to reduce degradation that occurs through dehydration of Asp to form a cyclic succinimide intermediate followed by isomerization to iso-aspartate;

[0444] (h) modifications at position 1 or 2 as described herein that improve resistance to DPP-IV cleavage, optionally in combination with an intramolecular bridge such as a lactam bridge between positions “i” and “i+4”, wherein i is an integer from 12 to 25, e.g., 12, 16, 20, 24;

[0445] (i) acylating or alkylating the glucagon peptide as described herein, which may increase the activity at the glucagon receptor and/or the GLP-1 receptor, increase half-life in circulation and/or extending the duration of action and/or delaying the onset of action, optionally combined with addition of a hydrophilic moiety, additionally or alternatively, optionally combined with a modification which selectively reduces activity at the GLP-1 peptide, e.g., a modification of the Thr at position 7, such as a substitution of the Thr at position 7 with an amino acid lacking a hydroxyl group, e.g., Abu or Ile; deleting amino acids C-terminal to the amino acid at position 27 (e.g., deleting one or both of the amino acids at positions 28 and 29, yielding a peptide 27 or 28 amino acids in length);

[0446] (j) C-terminal extensions as described herein;

[0447] (k) homodimerization or heterodimerization as described herein; and

[0448] combinations of the (a) through (k).

[0449] In some embodiments, exemplary modifications of the Class 1 glucagon related peptide include at least one amino acid modification selected from Group A and one or more amino acid modifications selected from Group B and/or Group C,

wherein Group A is:

[0450] substitution of Asn at position 28 with a charged amino acid;

[0451] substitution of Asn at position 28 with a charged amino acid selected from the group consisting of Lys, Arg, His, Asp, Glu, cysteic acid, and homocysteic acid;

[0452] substitution at position 28 with Asn, Asp, or Glu;

[0453] substitution at position 28 with Asp;

[0454] substitution at position 28 with Glu;

[0455] substitution of Thr at position 29 with a charged amino acid;

[0456] substitution of Thr at position 29 with a charged amino acid selected from the group consisting of Lys, Arg, His, Asp, Glu, cysteic acid, and homocysteic acid;

[0457] substitution at position 29 with Asp, Glu, or Lys;

[0458] substitution at position 29 with Glu;

[0459] insertion of 1-3 charged amino acids after position 29;

[0460] insertion after position 29 of Glu or Lys;

[0461] insertion after position 29 of Gly-Lys or Lys-Lys;

[0462] or combinations thereof;

wherein Group B is:

[0463] substitution of Asp at position 15 with Glu;

[0464] substitution of Ser at position 16 with Thr or Aib;

and wherein Group C is:

[0465] substitution of His at position 1 with a non-native amino acid that reduces susceptibility of the glucagon peptide to cleavage by dipeptidyl peptidase IV (DPP-IV),

[0466] substitution of Ser at position 2 with a non-native amino acid that reduces susceptibility of the glucagon peptide to cleavage by dipeptidyl peptidase IV (DPP-IV),

[0467] substitution of Lys at position 12 with Arg;

[0468] substitution of Gln at position 20 with Ser, Thr, Ala or Aib;

[0469] substitution of Asp at position 21 with Glu;

[0470] substitution of Gln at position 24 with Ser, Thr, Ala or Aib;

[0471] substitution of Met at position 27 with Leu or Nle;

[0472] deletion of amino acids at positions 27-29;

[0473] deletion of amino acids at positions 28-29;

[0474] deletion of the amino acid at positions 29;

[0475] or combinations thereof.

[0476] In exemplary embodiments, Lys at position 12 is substituted with Arg. In other exemplary embodiments amino acids at positions 29 and/or 28, and optionally at position 27, are deleted.

[0477] In some specific embodiments, the glucagon peptide comprises (a) an amino acid modification at position 1 and/or 2 that confers DPP-IV resistance, e.g., substitution with DMIA at position 1, or Aib at position 2, (b) an intramolecular bridge within positions 12-29, e.g. at positions 16 and 20, or one or more substitutions of the amino acids at positions 16, 20, 21, and 24 with an α,α disubstituted amino acid, optionally (c) linked to a hydrophilic moiety such as PEG, e.g., through Cys at position 24, 29 or at the C-terminal amino acid, optionally (d) an amino acid modification at position 27 that substitutes Met with, e.g., Nle, optionally (e) amino acid modifications at positions 20, 21 and 24 that reduce degradation, and optionally (f) linked to SEQ ID NO: 820. When the glucagon peptide is linked to SEQ ID NO: 820, the amino acid at position 29 in certain embodiments is Thr or Gly. In other specific embodiments, the glucagon peptide comprises (a) Asp28Glu29, or Glu28Glu29, or Glu29Glu30, or Glu28Glu30 or Asp28Glu30, and optionally (b) an amino acid modification at position 16 that substitutes Ser with, e.g. Thr or Aib, and optionally (c) an amino acid modification at position 27 that substitutes Met with, e.g., Nle, and optionally (d) amino acid modifications at positions 20, 21 and 24 that reduce degradation. In a specific embodiment, the glucagon peptide is T16, A20, E21, A24, Nle27, D28, E29.

[0478] In some embodiments, the Class 1 glucagon related peptide comprises the amino acid sequence:

[0479] X1-X2-Gln-Gly-Thr-Phe-Thr-Ser-Asp-Tyr-Ser-Lys-Tyr-Leu-Asp-Ser-Arg-Arg-Ala-Gln-Asp-Phe-Val-Gln-Trp-Leu-Met-Z (SEQ ID NO: 839) with 1 to 3 amino acid modifications thereto,

[0480] wherein X1 and/or X2 is a non-native amino acid that reduces susceptibility of (or increases resistance of) the glucagon peptide to cleavage by dipeptidyl peptidase IV (DPP-IV),

[0481] wherein Z is selected from the group consisting of —COOH (the naturally occurring C-terminal carboxylate), -Asn-COOH, Asn-Thr-COOH, and Y—COOH, wherein Y is 1 to 2 amino acids, and

[0482] wherein an intramolecular bridge, preferably a covalent bond, connects the side chains of an amino acid at position i and an amino acid at position i+4, wherein i is 12, 16, 20 or 24.

[0483] In some embodiments, the intramolecular bridge is a lactam bridge. In some embodiments, the amino acids at positions i and i+4 of SEQ ID NO: 839 are Lys and Glu, e.g., Glu16 and Lys20. In some embodiments, X1 is selected from the group consisting of: D-His, N-methyl-His, alpha-methyl-His, imidazole acetic acid, des-amino-His, hydroxyl-His, acetyl-His, homo-His, and alpha, alpha-dimethyl imidiazole acetic acid (DMIA). In other embodiments, X2 is selected from the group consisting of: D-Ser, D-Ala, Gly, N-methyl-Ser, Val, and alpha, amino isobutyric acid (Aib). In some embodiments, the glucagon peptide is covalently linked to a hydrophilic moiety at any of amino acid positions 16, 17, 20, 21, 24, 29, 40, within a C-terminal extension, or at the C-terminal amino acid. In exemplary embodiments, this hydrophilic moiety is covalently linked to a Lys, Cys, Orn, homocysteine, or acetyl-phenylalanine residue at any of these positions. Exemplary hydrophilic moieties include polyethylene glycol (PEG), for example, of a molecular weight of about 1,000 Daltons to about 40,000 Daltons, or about 20,000 Daltons to about 40,000 Daltons.

[0484] In other embodiments, the Class I glucagon related peptide comprises the amino acid sequence:

(SEQ ID NO: 839)
X1-X2-Gln-Gly-Thr-Phe-Thr-Ser-Asp-Tyr-Ser-Lys-
Tyr-Leu-Asp-Ser-Arg-Arg-Ala-Gln-Asp-Phe-Val-Gln-
Trp-Leu-Met-Z,

[0485] wherein X1 and/or X2 is a non-native amino acid that reduces susceptibility of (or increases resistance of) the glucagon peptide to cleavage by dipeptidyl peptidase IV (DPP-IV),

[0486] wherein one, two, three, four or more of positions 16, 20, 21, and 24 of the glucagon peptide is substituted with an α, α-disubstituted amino acid, and

[0487] wherein Z is selected from the group consisting of —COOH (the naturally occurring C-terminal carboxylate), -Asn-COOH, Asn-Thr-COOH, and Y—COOH, wherein Y is 1 to 2 amino acids.

[0488] Exemplary further amino acid modifications to the foregoing Class 1 glucagon related peptides or analogs include substitution of Thr at position 7 with an amino acid lacking a hydroxyl group, e.g., aminobutyric acid (Abu), Ile, optionally, in combination with substitution or addition of an amino acid comprising a side chain covalently attached (optionally, through a spacer) to an acyl or alkyl group, which acyl or alkyl group is non-native to a naturally-occurring amino acid, substitution of Lys at position 12 with Arg; substitution of Asp at position 15 with Glu; substitution of Ser at position 16 with Thr or Aib; substitution of Gln at position 20 with Ser, Thr, Ala or Aib; substitution of Asp at position 21 with Glu; substitution of Gln at position 24 with Ser, Thr, Ala or Aib; substitution of Met at position 27 with Leu or Nle; substitution of Asn at position 28 with a charged amino acid; substitution of Asn at position 28 with a charged amino acid selected from the group consisting of Lys, Arg, His, Asp, Glu, cysteic acid, and homocysteic acid; substitution at position 28 with Asn, Asp, or Glu; substitution at position 28 with Asp; substitution at position 28 with Glu; substitution of Thr at position 29 with a charged amino acid; substitution of Thr at position 29 with a charged amino acid selected from the group consisting of Lys, Arg, His, Asp, Glu, cysteic acid, and homocysteic acid; substitution at position 29 with Asp, Glu, or Lys; substitution at position 29 with Glu; insertion of 1-3 charged amino acids after position 29; insertion at position 30 (i.e., after position 29) of Glu or Lys; optionally with insertion at position 31 of Lys; addition of SEQ ID NO: 820 to the C-terminus, optionally, wherein the amino acid at position 29 is Thr or Gly; substitution or addition of an amino acid covalently attached to a hydrophilic moiety; or a combination thereof.

[0489] Any of the modifications described above in reference to Class 1 glucagon agonists which increase glucagon receptor activity, retain partial glucagon receptor activity, improve solubility, increase stability, or reduce degradation can be applied to Class 1 glucagon peptides individually or in combination. Thus, Class 1 glucagon related peptides can be prepared that retain at least 20% of the activity of native glucagon at the glucagon receptor, and which are soluble at a concentration of at least 1 mg/mL at a pH between 6 and 8 or between 6 and 9, (e.g. pH 7), and optionally retain at least 95% of the original peptide (e.g. 5% or less of the original peptide is degraded or cleaved) after 24 hours at 25° C. Alternatively, high potency Class 1 glucagon peptides can be prepared that exhibit at least about 100%, 125%, 150%, 175%, 200%, 250%, 300%, 350%, 400%, 450%, 500%, 600%, 700%, 800%, 900% or 10-fold or more of the activity of native glucagon at the glucagon receptor, and optionally are soluble at a concentration of at least 1 mg/mL at a pH between 6 and 8 or between 6 and 9, (e.g. pH 7), and optionally retains at least 95% of the original peptide (e.g. 5% or less of the original peptide is degraded or cleaved) after 24 hours at 25° C. In some embodiments, the Class 1 glucagon peptides described herein may exhibit at least any of the above indicated relative levels of activity at the glucagon receptor but no more than 1,000%, 5,000% or 10,000% of the activity of native glucagon at the glucagon receptor.

### Examples of Embodiments of Class 1 Glucagon Related Peptides

[0490] In accordance with some embodiments the native glucagon peptide of SEQ ID NO: 801 is modified by the substitution of the native amino acid at position 28 and/or 29 with a negatively charged amino acid (e.g., aspartic acid or glutamic acid) and optionally the addition of a negatively charged amino acid (e.g., aspartic acid or glutamic acid) to the carboxy terminus of the peptide. In an alternative embodiment the native glucagon peptide of SEQ ID NO: 801 is modified by the substitution of the native amino acid at position 29 with a positively charged amino acid (e.g., lysine, arginine or histidine) and optionally the addition of one or two positively charged amino acid (e.g., lysine, arginine or histidine) on the carboxy terminus of the peptide. In accordance with some embodiments a glucagon analog having improved solubility and stability is provided wherein the analog comprises the amino acid sequence of SEQ ID NO: 834 with the proviso that at least one amino acids at position, 28, or 29 is substituted with an acidic amino acid and/or an additional acidic amino acid is added at the carboxy terminus of SEQ ID NO: 834. In some embodiments the acidic amino acids are independently selected from the group consisting of Asp, Glu, cysteic acid and homocysteic acid.

[0491] In accordance with some embodiments a glucagon agonist having improved solubility and stability is provided wherein the agonist comprises the amino acid sequence of SEQ ID NO: 833, wherein at least one of the amino acids at positions 27, 28 or 29 is substituted with a non-native amino acid residue (i.e. at least one amino acid present at position 27, 28 or 29 of the analog is an acid amino acid different from the amino acid present at the corresponding position in SEQ ID NO: 801). In accordance with some embodiments a glucagon agonist is provided comprising the sequence of SEQ ID NO: 833 with the proviso that when the amino acid at position 28 is asparagine and the amino acid at position 29 is threonine, the peptide further comprises one to two amino acids, independently selected from the group consisting of Lys, Arg, His, Asp or Glu, added to the carboxy terminus of the glucagon peptide.

[0492] It has been reported that certain positions of the native glucagon peptide can be modified while retaining at least some of the activity of the parent peptide. Accordingly, applicants anticipate that one or more of the amino acids located at positions at positions 2, 5, 7, 10, 11, 12, 13, 14, 16, 17, 18, 19, 20, 21, 24, 27, 28 or 29 of the peptide of SEQ ID NO: 811 can be substituted with an amino acid different from that present in the native glucagon peptide, and still retain the enhanced potency, physiological pH stability and biological activity of the parent glucagon peptide. For example, in accordance with some embodiments the methionine residue present at position 27 of the native peptide is changed to leucine or norleucine to prevent oxidative degradation of the peptide.

[0493] In some embodiments a glucagon analog of SEQ ID NO: 833 is provided wherein 1 to 6 amino acids, selected from positions 1, 2, 5, 7, 10, 11, 12, 13, 14, 16, 17, 18, 19, 20, 21 or 24 of the analog differ from the corresponding amino acid of SEQ ID NO: 801. In accordance with another embodiment a glucagon analog of SEQ ID NO: 833 is provided wherein 1 to 3 amino acids selected from positions 1, 2, 5, 7, 10, 11, 12, 13, 14, 16, 17, 18, 19, 20, 21 or 24 of the analog differ from the corresponding amino acid of SEQ ID NO: 801. In another embodiment, a glucagon analog of SEQ ID NO: 807, SEQ ID NO: 808 or SEQ ID NO: 834 is provided wherein 1 to 2 amino acids selected from positions 1, 2, 5, 7, 10, 11, 12, 13, 14, 16, 17, 18, 19, 20, 21 or 24 of the analog differ from the corresponding amino acid of SEQ ID NO: 801, and in a further embodiment those one to two differing amino acids represent conservative amino acid substitutions relative to the amino acid present in the native sequence (SEQ ID NO: 801). In some embodiments a glucagon peptide of SEQ ID NO: 811 or SEQ ID NO: 813 is provided wherein the glucagon peptide further comprises one, two or three amino acid substitutions at positions selected from positions 2, 5, 7, 10, 11, 12, 13, 14, 16, 17, 18, 19, 20, 21, 24, 27 or 29. In some embodiments the substitutions at positions 2, 5, 7, 10, 11, 12, 13, 14, 16, 17, 18, 19, 20, 27 or 29 are conservative amino acid substitutions.

[0494] In some embodiments a glucagon agonist is provided comprising an analog peptide of SEQ ID NO: 801 wherein the analog differs from SEQ ID NO: 801 by having an amino acid other than serine at position 2 and by having an acidic amino acid substituted for the native amino acid at position 28 or 29 or an acidic amino acid added to the carboxy terminus of the peptide of SEQ ID NO: 801. In some embodiments the acidic amino acid is aspartic acid or glutamic acid. In some embodiments a glucagon analog of SEQ ID NO: 809, SEQ ID NO: 812, SEQ ID NO: 813 or SEQ ID NO: 832 is provided wherein the analog differs from the parent molecule by a substitution at position 2. More particularly, position 2 of the analog peptide is substituted with an amino acid selected from the group consisting of D-serine, alanine, D-alanine, glycine, n-methyl serine and amino isobutyric acid.

[0495] In another embodiment a glucagon agonist is provided comprising an analog peptide of SEQ ID NO: 801 wherein the analog differs from SEQ ID NO: 801 by having an amino acid other than histidine at position 1 and by having an acidic amino acid substituted for the native amino acid at position 28 or 29 or an acidic amino acid added to the carboxy terminus of the peptide of SEQ ID NO: 801. In some embodiments the acidic amino acid is aspartic acid or glutamic acid. In some embodiments a glucagon analog of SEQ ID NO: 809, SEQ ID NO: 812, SEQ ID NO: 813 or SEQ ID NO: 832 is provided wherein the analog differs from the parent molecule by a substitution at position 1. More particularly, position 1 of the analog peptide is substituted with an amino acid selected from the group consisting of DMIA, D-histidine, desaminohistidine, hydroxyl-histidine, acetyl-histidine and homo-histidine.

[0496] In accordance with some embodiments the modified glucagon peptide comprises a sequence selected from the group consisting of SEQ ID NO: 809, SEQ ID NO: 812, SEQ ID NO: 813 and SEQ ID NO: 832. In a further embodiment a glucagon peptide is provided comprising a sequence of SEQ ID NO: 809, SEQ ID NO: 812, SEQ ID NO: 813 or SEQ ID NO: 832 further comprising one to two amino acids, added to the C-terminus of SEQ ID NO: 809, SEQ ID NO: 812, SEQ ID NO: 813 or SEQ ID NO: 832, wherein the additional amino acids are independently selected from the group consisting of Lys, Arg, His, Asp Glu, cysteic acid or homocysteic acid. In some embodiments the additional amino acids added to the carboxy terminus are selected from the group consisting of Lys, Arg, His, Asp or Glu or in a further embodiment the additional amino acids are Asp or Glu.

[0497] In another embodiment the glucagon peptide comprises the sequence of SEQ ID NO: 807 or a glucagon agonist analog thereof. In some embodiments the peptide comprising a sequence selected from the group consisting of SEQ ID NO: 808, SEQ ID NO: 810, SEQ ID NO: 811, SEQ ID NO: 812 and SEQ ID NO: 813. In another embodiment the peptide comprising a sequence selected from the group consisting of SEQ ID NO: 808, SEQ ID NO: 810 and SEQ ID NO: 811. In some embodiments the glucagon peptide comprises the sequence of SEQ ID NO: 808, SEQ ID NO: 810 and SEQ ID NO: 811 further comprising an additional amino acid, selected from the group consisting of Asp and Glu, added to the C-terminus of the glucagon peptide. In some embodiments the glucagon peptide comprises the sequence of SEQ ID NO: 811 or SEQ ID NO: 813, and in a further embodiment the glucagon peptide comprises the sequence of SEQ ID NO: 811.

[0498] In accordance with some embodiments a glucagon agonist is provided comprising a modified glucagon peptide selected from the group consisting of:

(SEQ ID NO: 834)
NH₂-His-Ser-Gln-Gly-Thr-Phe-Thr-Ser-Asp-Tyr-Ser-
Lys-Tyr-Leu-Xaa-Ser-Arg-Arg-Ala-Gln-Asp-Phe-Val-
Gln-Trp-Leu-Xaa-Xaa-Xaa-R,
(SEQ ID NO: 811)
NH₂-His-Ser-Gln-Gly-Thr-Phe-Thr-Ser-Asp-Tyr-Ser-
Lys-Tyr-Leu-Asp-Ser-Arg-Arg-Ala-Gln-Asp-Phe-Val-
Gln-Trp-Leu-Met-Asp-Thr-R
and
(SEQ ID NO: 813)
NH₂-His-Ser-Gln-Gly-Thr-Phe-Thr-Ser-Asp-Tyr-Ser-
Xaa-Tyr-Leu-Glu-Ser-Arg-Arg-Ala-Gln-Asp-Phe-Val-
Gln-Trp-Leu-Met-Asp-Thr-R

[0499] wherein Xaa at position 15 is Asp, Glu, cysteic acid, homoglutamic acid or homocysteic acid, the Xaa at position 28 is Asn or an acidic amino acid and the Xaa at position 29 is Thr or an acidic amino acid and R is an acidic amino acid, COOH or CONH₂, with the proviso that an acidic acid residue is present at one of positions 28, 29 or 30. In some embodiments R is COOH, and in another embodiment R is CONH₂.

[0500] The present disclosure also encompasses glucagon fusion peptides wherein a second peptide has been fused to the C-terminus of the glucagon peptide to enhance the stability and solubility of the glucagon peptide. More particularly, the fusion glucagon peptide may comprise a glucagon agonist analog comprising a glucagon peptide NH₂-His-Ser-Gln-Gly-Thr-Phe-Thr-Ser-Asp-Tyr-Ser-Lys-Tyr-Leu-Xaa-Ser-Arg-Arg-Ala-Gln-Asp-Phe-Val-Gln-Trp-Leu-Xaa-Xaa-Xaa-R (SEQ ID NO: 834), wherein R is an acidic amino acid or a bond and an amino acid sequence of SEQ ID NO: 820 (GPSSGAPPPS), SEQ ID NO: 821 (KRNRNNIA) or SEQ ID NO: 822 (KRNR) linked to the carboxy terminal amino acid of the glucagon peptide. In some embodiments the glucagon peptide is selected from the group consisting of SEQ ID NO: 833, SEQ ID NO: 807 or SEQ ID NO: 808 further comprising an amino acid sequence of SEQ ID NO: 820 (GPSSGAPPPS), SEQ ID NO: 821 (KRNRNNIA) or SEQ ID NO: 822 (KRNR) linked to the carboxy terminal amino acid of the glucagon peptide. In some embodiments the glucagon fusion peptide comprises SEQ ID NO: 802, SEQ ID NO: 803, SEQ ID NO: 804, SEQ ID NO: 805 and SEQ ID NO: 806 or a glucagon agonist analog thereof, further comprising an amino acid sequence of SEQ ID NO: 820 (GPSSGAPPPS), SEQ ID NO: 821 (KRNRNNIA) or SEQ ID NO: 822 (KRNR) linked to amino acid 29 of the glucagon peptide. In accordance with some embodiments the fusion peptide further comprises a PEG chain linked to an amino acid at position 16, 17, 21, 24, 29, within a C-terminal extension, or at the C-terminal amino acid, wherein the PEG chain is selected from the range of 500 to 40,000 Daltons. In some embodiments the amino acid sequence of SEQ ID NO: 820 (GPSSGAPPPS), SEQ ID NO: 821 (KRNRNNIA) or SEQ ID NO: 822 (KRNR) is bound to amino acid 29 of the glucagon peptide through a peptide bond. In some embodiments the glucagon peptide portion of the glucagon fusion peptide comprises a sequence selected from the group consisting of SEQ ID NO: 810, SEQ ID NO: 811 and SEQ ID NO: 813. In some embodiments the glucagon peptide portion of the glucagon fusion peptide comprises the sequence of SEQ ID NO: 811 or SEQ ID NO: 813, wherein a PEG chain is linked at position 21, 24, 29, within a C-terminal extension or at the C-terminal amino acid, respectively.

[0501] In another embodiment the glucagon peptide sequence of the fusion peptide comprises the sequence of SEQ ID NO: 811, further comprising an amino acid sequence of SEQ ID NO: 820 (GPSSGAPPPS), SEQ ID NO: 821 (KRNRNNIA) or SEQ ID NO: 822 (KRNR) linked to amino acid 29 of the glucagon peptide. In some embodiments the glucagon fusion peptide comprises a sequence selected from the group consisting of SEQ ID NO: 824, SEQ ID NO: 825 and SEQ ID NO: 826. Typically the fusion peptides of the present invention will have a C-terminal amino acid with the standard carboxylic acid group. However, analogs of those sequences wherein the C-terminal amino acid has an amide substituted for the carboxylic acid are also encompassed as embodiments. In accordance with some embodiments the fusion glucagon peptide comprises a glucagon agonist analog selected from the group consisting of SEQ ID NO: 810, SEQ ID NO: 811 and SEQ ID NO: 813, further comprising an amino acid sequence of SEQ ID NO: 823 (GPSSGAPPPS-CONH₂) linked to amino acid 29 of the glucagon peptide.

[0502] The glucagon agonists of the present invention can be further modified to improve the peptide's solubility and stability in aqueous solutions while retaining the biological activity of the glucagon peptide. In accordance with some embodiments, introduction of hydrophilic groups at one or more positions selected from positions 16, 17, 20, 21, 24 and 29 of the peptide of SEQ ID NO: 811, or a glucagon agonist analog thereof, are anticipated to improve the solubility and stability of the pH stabilize glucagon analog. More particularly, in some embodiments the glucagon peptide of SEQ ID NO: 810, SEQ ID NO: 811, SEQ ID NO: 813, or SEQ ID NO: 832 is modified to comprise one or more hydrophilic groups covalently linked to the side chains of amino acids present at positions 21 and 24 of the glucagon peptide.

[0503] In accordance with some embodiments, the glucagon peptide of SEQ ID NO: 811 is modified to contain one or more amino acid substitution at positions 16, 17, 20, 21, 24 and/or 29, wherein the native amino acid is substituted with an amino acid having a side chain suitable for crosslinking with hydrophilic moieties, including for example, PEG. The native peptide can be substituted with a naturally occurring amino acid or a synthetic (non-naturally occurring) amino acid. Synthetic or non-naturally occurring amino acids refer to amino acids that do not naturally occur in vivo but which, nevertheless, can be incorporated into the peptide structures described herein.

[0504] In some embodiments, a glucagon agonist of SEQ ID NO: 810, SEQ ID NO: 811 or SEQ ID NO: 813 is provided wherein the native glucagon peptide sequence has been modified to contain a naturally occurring or synthetic amino acid in at least one of positions 16, 17, 21, 24, 29, within a C-terminal extension or at the C-terminal amino acid of the native sequence, wherein the amino acid substitute further comprises a hydrophilic moiety. In some embodiments the substitution is at position 21 or 24, and in a further embodiment the hydrophilic moiety is a PEG chain. In some embodiments the glucagon peptide of SEQ ID NO: 811 is substituted with at least one cysteine residue, wherein the side chain of the cysteine residue is further modified with a thiol reactive reagent, including for example, maleimido, vinyl sulfone, 2-pyridylthio, haloalkyl, and haloacyl. These thiol reactive reagents may contain carboxy, keto, hydroxyl, and ether groups as well as other hydrophilic moieties such as polyethylene glycol units. In an alternative embodiment, the native glucagon peptide is substituted with lysine, and the side chain of the substituting lysine residue is further modified using amine reactive reagents such as active esters (succinimido, anhydride, etc) of carboxylic acids or aldehydes of hydrophilic moieties such as polyethylene glycol. In some embodiments the glucagon peptide is selected form the group consisting of SEQ ID NO: 814, SEQ ID NO: 815, SEQ ID NO: 816, SEQ ID NO: 817, SEQ ID NO: 818 and SEQ ID NO: 819.

[0505] In accordance with some embodiments the pegylated glucagon peptide comprises two or more polyethylene glycol chains covalently bound to the glucagon peptide wherein the total molecular weight of the glucagon chains is about 1,000 to about 5,000 Daltons. In some embodiments the pegylated glucagon agonist comprises a peptide of SEQ ID NO: 806, wherein a PEG chain is covalently linked to the amino acid residue at position 21 and at position 24, and wherein the combined molecular weight of the two PEG chains is about 1,000 to about 5,000 Daltons. In another embodiment the pegylated glucagon agonist comprises a peptide of SEQ ID NO: 806, wherein a PEG chain is covalently linked to the amino acid residue at position 21 and at position 24, and wherein the combined molecular weight of the two PEG chains is about 5,000 to about 20,000 Daltons.

[0506] The polyethylene glycol chain may be in the form of a straight chain or it may be branched. In accordance with some embodiments the polyethylene glycol chain has an average molecular weight selected from the range of about 500 to about 40,000 Daltons. In some embodiments the polyethylene glycol chain has a molecular weight selected from the range of about 500 to about 5,000 Daltons. In another embodiment the polyethylene glycol chain has a molecular weight of about 20,000 to about 40,000 Daltons.

[0507] Any of the glucagon peptides described above may be further modified to include a covalent or non-covalent intramolecular bridge or an alpha helix-stabilizing amino acid within the C-terminal portion of the glucagon peptide (amino acid positions 12-29). In accordance with some embodiments, the glucagon peptide comprises any one or more of the modifications discussed above in addition to an amino acid substitution at positions 16, 20, 21, or 24 (or a combination thereof) with an α,α-disubstituted amino acid, e.g., Aib. In accordance with another embodiment, the glucagon peptide comprises any one or more modifications discussed above in addition to an intramolecular bridge, e.g., a lactam, between the side chains of the amino acids at positions 16 and 20 of the glucagon peptide.

[0508] In accordance with some embodiments, the glucagon peptide comprises the amino acid sequence of SEQ ID NO: 877, wherein the Xaa at position 3 is an amino acid comprising a side chain of Structure I, II, or III:

[chemical structure]

wherein R¹ is C₀₋₃ alkyl or C₀₋₃ heteroalkyl; R² is NHR⁴ or C₁₋₃ alkyl; R³ is C₁₋₃ alkyl; R⁴ is H or C₁₋₃ alkyl; X is NH, O, or S; and Y is NHR⁴, SR³, or OR³. In some embodiments, X is NH or Y is NHR⁴. In some embodiments, R¹ is C₀₋₂ alkyl or Cᵢ heteroalkyl. In some embodiments, R² is NHR⁴ or C₁ alkyl. In some embodiments, R⁴ is H or C¹ alkyl. In exemplary embodiments an amino acid comprising a side chain of Structure I is provided wherein, R¹ is CH₂—S, X is NH, and R² is CH₃ (acetamidomethyl-cysteine, C(Acm)); R¹ is CH₂, X is NH, and R² is CH₃ (acetyldiaminobutanoic acid, Dab(Ac)); R¹ is C₀ alkyl, X is NH, R² is NHR⁴, and R⁴ is H (carbamoyldiaminopropanoic acid, Dap(urea)); or R¹ is CH₂—CH₂, X is NH, and R² is CH₃ (acetylornithine, Orn(Ac)). In exemplary embodiments an amino acid comprising a side chain of Structure II is provided, wherein R¹ is CH₂, Y is NHR⁴, and R⁴ is CH₃ (methylglutamine, Q(Me)); In exemplary embodiments an amino acid comprising a side chain of Structure III is provided wherein, R¹ is CH₂ and R⁴ is H (methionine-sulfoxide, M(O)); In specific embodiments, the amino acid at position 3 is substituted with Dab(Ac). For example, glucagon agonists can comprise the amino acid sequence of SEQ ID NO: 863, SEQ ID NO: 869, SEQ ID NO: 871, SEQ ID NO: 872, SEQ ID NO: 873, and SEQ ID NO: 874.

[0509] In certain embodiments, the glucagon peptide is an analog of the glucagon peptide of SEQ ID NO: 877. In specific aspects, the analog comprises any of the amino acid modifications described herein, including, but not limited to: a substitution of Asn at position 28 with a charged amino acid; a substitution of Asn at position 28 with a charged amino acid selected from the group consisting of Lys, Arg, His, Asp, Glu, cysteic acid, and homocysteic acid; a substitution at position 28 with Asn, Asp, or Glu; a substitution at position 28 with Asp; a substitution at position 28 with Glu; a substitution of Thr at position 29 with a charged amino acid; a substitution of Thr at position 29 with a charged amino acid selected from the group consisting of Lys, Arg, His, Asp, Glu, cysteic acid, and homocysteic acid; a substitution at position 29 with Asp, Glu, or Lys; a substitution at position 29 with Glu; a insertion of 1-3 charged amino acids after position 29; an insertion after position 29 of Glu or Lys; an insertion after position 29 of Gly-Lys or Lys-Lys; and a combination thereof.

[0510] In certain embodiments, the analog of the glucagon peptide of SEQ ID NO: 877 comprises an α,α-disubstituted amino acid, such as Aib, at one, two, three, or all of positions 16, 20, 21, and 24.

[0511] In certain embodiments, the analog of the glucagon peptide of SEQ ID NO: 877 comprises one or more of the following: substitution of His at position 1 with a non-native amino acid that reduces susceptibility of the glucagon peptide to cleavage by dipeptidyl peptidase IV (DPP-IV), substitution of Ser at position 2 with a non-native amino acid that reduces susceptibility of the glucagon peptide to cleavage by dipeptidyl peptidase IV (DPP-IV), substitution of Thr at position 7 with an amino acid lacking a hydroxyl group, e.g., Abu or Ile; substitution of Tyr at position 10 with Phe or Val; substitution of Lys at position 12 with Arg; substitution of Asp at position 15 with Glu, substitution of Ser at position 16 with Thr or Aib; substitution of Gln at position 20 with Ala or Aib; substitution of Asp at position 21 with Glu; substitution of Gln at position 24 with Ala or Aib; substitution of Met at position 27 with Leu or Nle; deletion of amino acids at positions 27-29; deletion of amino acids at positions 28-29; deletion of the amino acid at positions 29; addition of the amino acid sequence of SEQ ID NO: 820 to the C-terminus, wherein the amino acid at position 29 is Thr or Gly, or a combination thereof.

[0512] In accordance with specific embodiments, the glucagon peptide comprises the amino acid sequence of any of SEQ ID NOs: 862-867 and 869-874.

[0513] In certain embodiments, the analog of the glucagon peptide comprising SEQ ID NO: 877 comprises a hydrophilic moiety, e.g., PEG, covalently linked to the amino acid at any of positions 16, 17, 20, 21, 24, and 29 or at the C-terminal amino acid.

[0514] In certain embodiments, the analog of the glucagon peptide comprising SEQ ID NO: 877 comprises an amino acid comprising a side chain covalently attached, optionally, through a spacer, to an acyl group or an alkyl group, which acyl group or alkyl group is non-native to a naturally-occurring amino acid. The acyl group in some embodiments is a C4 to C30 fatty acyl group. In other embodiments, the alkyl group is a C₄ to C₃₀ alkyl. In specific aspects, the acyl group or alkyl group is covalently attached to the side chain of the amino acid at position 10. In some embodiments, the amino acid at position 7 is Ile or Abu.

[0515] The glucagon agonist may be a peptide comprising the amino acid sequence of any of the SEQ ID NOs: 801-919, optionally with up to 1, 2, 3, 4, or 5 further modifications that retain glucagon agonist activity. In certain embodiments, the glucagon agonist comprises the amino acids of any of SEQ ID NOs: 859-919.

### Class 2 Glucagon Related Peptides

[0516] In certain embodiments, the glucagon related peptide is a Class 2 glucagon related peptide, which is described herein and in International Patent Publication No. WO 2010/011439, and U.S. Application No. 61/187,578, (filed on Jun. 16, 2009) the contents of which are incorporated by reference in their entirety.

[0517] The biological sequences referenced in the following section (SEQ ID NOs: 1001-1262) relating to Class 2 glucagon related peptides correspond to SEQ ID NOs: 1-262 in International Patent Publication No. WO 2010/011439. SEQ ID NOs: 1263 to 1275 relating to Class 2 glucagon related peptides correspond to SEQ ID NOs: 657 to 669 in U.S. Application No. 61/187,578.

### Activity

[0518] Native glucagon does not activate the GIP receptor, and normally has about 1% of the activity of native-GLP-1 at the GLP-1 receptor. Modifications to the native glucagon sequence described herein produce Class 2 glucagon related peptides that can exhibit potent glucagon activity equivalent to or better than the activity of native glucagon (SEQ ID NO: 1001), potent GIP activity equivalent to or better than the activity of native GIP (SEQ ID NO: 1004), and/or potent GLP-1 activity equivalent to or better than the activity of native GLP-1. In this regard, the Class 2 glucagon related peptide may be one of a glucagon/GIP co-agonist, glucagon/GIP/GLP-1 tri-agonist, GIP/GLP-1 co-agonist, or a GIP agonist glucagon peptide, as further described herein.

[0519] In some embodiments, the Class 2 glucagon related peptides described herein exhibit an EC₅₀ for GIP receptor activation activity of about 100 nM or less, or about 75, 50, 25, 10, 8, 6, 5, 4, 3, 2 or 1 nM or less. In some embodiments, the Class 2 glucagon related peptides exhibit an EC₅₀ for glucagon receptor activation of about 100 nM or less, or about 75, 50, 25, 10, 8, 6, 5, 4, 3, 2 or 1 nM or less. In some embodiments, the Class 2 glucagon related peptides exhibit an EC₅₀ for GLP-1 receptor activation of about 100 nM or less, or about 75, 50, 25, 10, 8, 6, 5, 4, 3, 2 or 1 nM or less. Receptor activation can be measured by in vitro assays measuring cAMP induction in HEK293 cells over-expressing the receptor, e.g. assaying HEK293 cells co-transfected with DNA encoding the receptor and a luciferase gene linked to cAMP responsive element as described in Example 2.

[0520] In some embodiments, Class 2 glucagon related peptides exhibit at least about 0.1%, 0.2%, 0.3%, 0.4%, 0.5%, 0.6%, 0.7%, 0.8%, 0.9%, 1%, 5%, 10%, 20%, 30%, 40%, 50%, 60%, 75%, 100%, 125%, 150%, 175% or 200% or higher activity at the GIP receptor relative to native GIP (GIP potency). In some embodiments, the glucagon peptides described herein exhibit no more than 1000%, 10,000%, 100,000%, or 1,000,000% activity at the GIP receptor relative to native GIP. In some embodiments, Class 2 glucagon related peptides exhibit at least about 1%, 5%, 10%, 20%, 30%, 40%, 50%, 60%, 75%, 100%, 125%, 150%, 175%, 200%, 250%, 300%, 350%, 400%, 450%, or 500% or higher activity at the glucagon receptor relative to native glucagon (glucagon potency). In some embodiments, the glucagon peptides described herein exhibit no more than 1000%, 10,000%, 100,000%, or 1,000,000% activity at the glucagon receptor relative to native glucagon. In some embodiments, Class 2 glucagon related peptides exhibit at least about 0.1%, 0.2%, 0.3%, 0.4%, 0.5%, 0.6%, 0.7%, 0.8%, 0.9%, 1%, 5%, 10%, 20%, 30%, 40%, 50%, 60%, 75%, 100%, 125%, 150%, 175% or 200% or higher activity at the GLP-1 receptor relative to native GLP-1 (GLP-1 potency). In some embodiments, the glucagon peptides described herein exhibit no more than 1000%, 10,000%, 100,000%, or 1,000,000% activity at the GLP-1 receptor relative to native GLP-1. A Class 2 glucagon related peptide's activity at a receptor relative to a native ligand of the receptor is calculated as the inverse ratio of EC₅₀s for the Class 2 glucagon related peptide vs. the native ligand.

[0521] In some embodiments, Class 2 glucagon related peptides exhibit activity at both the glucagon receptor and the GIP receptor (“glucagon/GIP co-agonists”). These Class 2 glucagon related peptides have lost native glucagon's selectivity for glucagon receptor compared to GIP receptor. In some embodiments, the EC₅₀ of the Class 2 glucagon related peptide at the GIP receptor is less than about 50-fold, 40-fold, 30-fold or 20-fold different (higher or lower) from its EC₅₀ at the glucagon receptor. In some embodiments, the GIP potency of the Class 2 glucagon related peptide is less than about 500-, 450-, 400-, 350-, 300-, 250-, 200-, 150-, 100-, 75-, 50-, 25-, 20-, 15-, 10-, or 5-fold different (higher or lower) from its glucagon potency. In some embodiments, the ratio of the EC₅₀ of the Class 2 glucagon related peptide at the GIP receptor divided by the EC₅₀ of the Class 2 glucagon related peptide at the glucagon receptor is less than about 100, 75, 60, 50, 40, 30, 20, 15, 10, or 5. In some embodiments, the ratio of the EC₅₀ at the GIP receptor divided by the EC₅₀ at the glucagon receptor is about 1 or less than about 1 (e.g., about 0.01, 0.013, 0.0167, 0.02, 0.025, 0.03, 0.05, 0.067, 0.1, 0.2). In some embodiments, the ratio of the GIP potency of the Class 2 glucagon related peptide compared to the glucagon potency of the Class 2 glucagon related peptide is less than about 500, 450, 400, 350, 300, 250, 200, 150, 100, 75, 60, 50, 40, 30, 20, 15, 10, or 5. In some embodiments, the ratio of the potency at the GIP receptor divided by the potency at the glucagon receptor is about 1 or less than about 1 (e.g., about 0.01, 0.013, 0.0167, 0.02, 0.025, 0.03, 0.05, 0.067, 0.1, 0.2). In some embodiments, GLP-1 activity have been significantly reduced or destroyed, e.g., by an amino acid modification at position 7, a deletion of the amino acid(s) C-terminal to the amino acid at position 27 or 28, yielding a 27- or 28-amino acid peptide, or a combination thereof.

[0522] In another aspect, Class 2 glucagon related peptides exhibit activity at the glucagon, GIP and GLP-1 receptors (“glucagon/GIP/GLP-1 tri-agonists”). These Class 2 glucagon related peptides have lost native glucagon's selectivity for the glucagon receptor compared to both the GLP-1 and GIP receptors. In some embodiments, the EC₅₀ of the Class 2 glucagon related peptide at the GIP receptor is less than about 50-fold, 40-fold, 30-fold or 20-fold different (higher or lower) from its respective EC₅₀s at the glucagon and GLP-1 receptors. In some embodiments, the GIP potency of the Class 2 glucagon related peptide is less than about 500-, 450-, 400-, 350-, 300-, 250-, 200-, 150-, 100-, 75-, 50-, 25-, 20-, 15-, 10-, or 5-fold different (higher or lower) from its glucagon and GLP-1 potencies. In some embodiments, the ratio of the EC₅₀ of the tri-agonist at the GIP receptor divided by the EC₅₀ of the tri-agonist at the GLP-1 receptor is less than about 100, 75, 60, 50, 40, 30, 20, 15, 10, or 5. In some embodiments, the ratio of the EC₅₀ at the GIP receptor divided by the EC₅₀ at the GLP-1 receptor is about 1 or less than about 1 (e.g., about 0.01, 0.013, 0.0167, 0.02, 0.025, 0.03, 0.05, 0.067, 0.1, 0.2). In some embodiments, the ratio of the GIP potency of the tri-agonist compared to the GLP-1 potency of the tri-agonist is less than about 100, 75, 60, 50, 40, 30, 20, 15, 10, or 5. In some embodiments, the ratio of the potency at the GIP receptor divided by the potency at the GLP-1 receptor is about 1 or less than about 1 (e.g., about 0.01, 0.013, 0.0167, 0.02, 0.025, 0.03, 0.05, 0.067, 0.1, 0.2). In related embodiments, the ratio of the EC₅₀ of the tri-agonist at the GIP receptor divided by the EC₅₀ of the tri-agonist at the glucagon receptor is less than about 100, 75, 60, 50, 40, 30, 20, 15, 10, or 5. In some embodiments, the ratio of the EC₅₀ at the GIP receptor divided by the EC₅₀ at the glucagon receptor is about 1 or less than about 1 (e.g., about 0.01, 0.013, 0.0167, 0.02, 0.025, 0.03, 0.05, 0.067, 0.1, 0.2). In some embodiments, the ratio of the GIP potency of the tri-agonist compared to the glucagon potency of the tri-agonist is less than about 500, 450, 400, 350, 300, 250, 200, 150, 100, 75, 60, 50, 40, 30, 20, 15, 10, or 5. In some embodiments, the ratio of the potency at the GIP receptor divided by the potency at the glucagon receptor is about 1 or less than about 1 (e.g., about 0.01, 0.013, 0.0167, 0.02, 0.025, 0.03, 0.05, 0.067, 0.1, 0.2). In some embodiments, the ratio of the EC₅₀ of the tri-agonist at the GLP-1 receptor divided by the EC₅₀ of the tri-agonist at the glucagon receptor is less than about 100, 75, 60, 50, 40, 30, 20, 15, 10, or 5. In some embodiments, the ratio of the EC₅₀ at the GLP-1 receptor divided by the EC₅₀ at the glucagon receptor is about 1 or less than about 1 (e.g., about 0.01, 0.013, 0.0167, 0.02, 0.025, 0.03, 0.05, 0.067, 0.1, 0.2). In some embodiments, the ratio of the GLP-1 potency of the tri-agonist compared to the glucagon potency of the tri-agonist is less than about 100, 75, 60, 50, 40, 30, 20, 15, 10, or 5. In some embodiments, the ratio of the potency at the GLP-1 receptor divided by the potency at the glucagon receptor is about 1 or less than about 1 (e.g., about 0.01, 0.013, 0.0167, 0.02, 0.025, 0.03, 0.05, 0.067, 0.1, 0.2).

[0523] In yet another aspect, Class 2 glucagon related peptides exhibit activity at the GLP-1 and GIP receptors, but in which the glucagon activity has been significantly reduced or destroyed (“GIP/GLP-1 co-agonists”), e.g., by an amino acid modification at position 3. For example, substitution at this position with an acidic, basic, or a hydrophobic amino acid (glutamic acid, ornithine, norleucine) reduces glucagon activity. In some embodiments, the EC₅₀ of the glucagon peptide at the GIP receptor is less than about 50-fold, 40-fold, 30-fold or 20-fold different (higher or lower) from its EC₅₀ at the GLP-1 receptor. In some embodiments, the GIP potency of the Class 2 glucagon related peptide is less than about 25-, 20-, 15-, 10-, or 5-fold different (higher or lower) from its GLP-1 potency. In some embodiments these Class 2 glucagon related peptides have about 10% or less of the activity of native glucagon at the glucagon receptor, e.g. about 1-10%, or about 0.1-10%, or greater than about 0.1% but less than about 10%. In some embodiments, the ratio of the EC₅₀ of the Class 2 glucagon related peptide at the GIP receptor divided by the EC₅₀ of the Class 2 glucagon related peptide at the GLP-1 receptor is less than about 100, 75, 60, 50, 40, 30, 20, 15, 10, or 5, and no less than 1. In some embodiments, the ratio of the GIP potency of the Class 2 glucagon related peptide compared to the GLP-1 potency of the Class 2 glucagon related peptide is less than about 100, 75, 60, 50, 40, 30, 20, 15, 10, or 5, and no less than 1.

[0524] In a further aspect, Class 2 glucagon related peptides exhibit activity at the GIP receptor, in which the glucagon and GLP-1 activity have been significantly reduced or destroyed (“GIP agonist glucagon peptides”), e.g., by amino acid modifications at positions 3 with Glu and 7 with Ile. In some embodiments, these Class 2 glucagon related peptides have about 10% or less of the activity of native glucagon at the glucagon receptor, e.g. about 1-10%, or about 0.1-10%, or greater than about 0.1%, 0.5%, or 1% but less than about 1%, 5%, or 10%. In some embodiments these Class 2 glucagon related peptides also have about 10% or less of the activity of native GLP-1 at the GLP-1 receptor, e.g. about 1-10%, or about 0.1-10%, or greater than about 0.1%, 0.5%, or 1% but less than about 1%, 5%, or 10%.

[0525] In some embodiments, when the Class 2 glucagon related peptide is not pegylated, the EC₅₀ of the Class 2 glucagon related peptide for GIP receptor activation is about 4, 2, 1 nM or less, or the analog has at least about 1%, 2%, 3%, 4% or 5% of the activity of native GIP at the GIP receptor. In related embodiments, the EC₅₀ of the unpegylated Class 2 glucagon related peptide for GLP-1 receptor activation is about 4, 2, 1 nM or less or has at least about 1%, 2%, 3%, 4% or 5% of the activity of native GLP-1 at the GLP-1 receptor. In yet other related embodiments, the EC₅₀ of the unpegylated Class 2 glucagon related peptide for glucagon receptor activation is about 4, 2, 1 nM or less, or at least about 5%, 10%, 15% or 20% of the activity of native glucagon at the glucagon receptor. In some embodiments, the unpegylated Class 2 glucagon related peptide has less than about 1% of the activity of native glucagon at the glucagon receptor. In other embodiments, the unpegylated Class 2 glucagon related peptide has less than about 10%, 5% or 1% of the activity of native GLP-1 at the GLP-1 receptor.

[0526] In embodiments where the Class 2 glucagon related peptides are linked to hydrophilic moieties such as PEG, the relative EC₅₀s at one or more receptors may be higher e.g., about 10-fold higher. For example, the EC₅₀ of a pegylated analog for GIP receptor activation is about 10 nM or less, or the Class 2 glucagon related peptide has at least about 0.1%, 0.2%, 0.3%, 0.4% or 0.5% of the activity of native GIP at the GIP receptor. In related embodiments, the EC₅₀ of a pegylated Class 2 glucagon related peptide for GLP-1 receptor activation is about 10 nM or less or has at least about 0.1%, 0.2%, 0.3%, 0.4% or 0.5% of the activity of native GLP-1 at the GLP-1 receptor. In yet other related embodiments, the EC₅₀ of a pegylated Class 2 glucagon related peptide for glucagon receptor activation is about 10 nM or less, or at least about 0.5%, 1%, 1.5% or 2% of the activity of native glucagon at the glucagon receptor. In some embodiments, the Class 2 glucagon related peptide has less than about 1% of the activity of native glucagon at the glucagon receptor. In other embodiments, the Class 2 glucagon related peptide has less than about 10%, 5% or 1% of the activity of native GLP-1 at the GLP-1 receptor.

### Modifications

[0527] The modifications disclosed herein in reference to a Class 2 glucagon related peptide permit the manipulation of glucagon (SEQ ID NO: 1001) to create glucagon peptides that exhibit increased GIP activity, glucagon activity, and/or GLP-1 activity. Other modifications disclosed herein in reference to a Class 2 glucagon related peptide prolong the half-life, increase solubility, or increase stability of the resulting peptide. Yet other modifications disclosed herein in reference to a Class 2 glucagon related peptide have no effect on activity, or can be made without destroying the desired activity or activities. Any of the combinations in reference to a Class 2 glucagon related peptide that serve the same purpose (e.g. increasing GIP activity) can be applied individually or in combination. Any of the single or sets of combinations in reference to a Class 2 glucagon related peptide that confer enhanced properties can be applied individually or in combination, e.g. increased GIP and/or GLP-1 activity can be combined with increased half-life. In related embodiments, 1, 2, 3, 4, 5, 6 or more of the amino acid modifications may be non-conservative substitutions, additions or deletions. In some embodiments, 1, 2, 3, 4, 5, 6 or more of the amino acid modifications may be conservative substitutions.

Modifications that Affect GIP Activity

[0528] Enhanced activity at the GIP receptor is provided by an amino acid modification at position 1. For example, His at position 1 is substituted with a large, aromatic amino acid, optionally Tyr, Phe, Trp, amino-Phe, nitro-Phe, chloro-Phe, sulfo-Phe, 4-pyridyl-Ala, methyl-Tyr, or 3-amino Tyr. The combination of Tyr at position 1 with stabilization of the alpha helix within the region corresponding to amino acids 12-29 provided a Class 2 glucagon related peptide that activates the GIP receptor as well as the GLP-1 receptor and the glucagon receptor. The alpha helix structure can be stabilized by, e.g., formation of a covalent or non-covalent intramolecular bridge, or substitution and/or insertion of amino acids around positions 12-29 with an alpha helix-stabilizing amino acid (e.g., an α,α-disubstituted amino acid).

[0529] Enhanced activity at the GIP receptor is also provided by amino acid modifications at positions 27 and/or 28, and optionally at position 29. For example, the Met at position 27 is substituted with a large aliphatic amino acid, optionally Leu, the Asn at position 28 is substituted with a small aliphatic amino acid, optionally Ala, and the Thr at position 29 is substituted with a small aliphatic amino acid, optionally Gly. Substitution with LAG at positions 27-29 provides increased GIP activity relative to the native MNT sequence at those positions.

[0530] Enhanced activity at the GIP receptor is also provided by an amino acid modification at position 12. For example, position 12 is substituted with a large, aliphatic, nonpolar amino acid, optionally Ile.

[0531] Enhanced activity at the GIP receptor is also provided by an amino acid modification at positions 17 and/or 18. For example, position 17 is substituted with a polar residue, optionally Gln, and position 18 is substituted with a small aliphatic amino acid, optionally Ala. A substitution with QA at positions 17 and 18 provides increased GIP activity relative to the native RR sequence at those positions.

[0532] Increased activity at the GIP receptor is provided by modifications that permit formation of an intramolecular bridge between amino acid side chains at positions from 12 to 29. For example, an intramolecular bridge can be formed by a covalent bond between the side chains of two amino acids at positions i and i+4 or between positions j and j+3, or between positions k and k+7. In exemplary embodiments, the bridge is between positions 12 and 16, 16 and 20, 20 and 24, 24 and 28, or 17 and 20. In other embodiments, non-covalent interactions such as salt bridges can be formed between positively and negatively charged amino acids at these positions.

[0533] Any of the modifications described above which increase GIP receptor activity can be applied individually or in combination. Combinations of the modifications that increase GIP receptor activity generally provide higher GIP activity than any of such modifications taken alone.

Modifications that Affect Glucagon Activity

[0534] In some embodiments, enhanced glucagon potency is provided by an amino acid modification at position 16 of native glucagon (SEQ ID NO: 1001). By way of nonlimiting example, such enhanced potency can be provided by substituting the naturally occurring serine at position 16 with glutamic acid or with another negatively charged amino acid having a side chain with a length of 4 atoms, or alternatively with any one of glutamine, homoglutamic acid, or homocysteic acid, or a charged amino acid having a side chain containing at least one heteroatom, (e.g. N, O, S, P) and with a side chain length of about 4 (or 3-5) atoms. In some embodiments the glucagon peptide retains its original selectivity for the glucagon receptor relative to the GLP-1 receptors.

[0535] Glucagon receptor activity can be reduced by an amino acid modification at position 3, e.g. substitution of the naturally occurring glutamine at position 3, with an acidic, basic, or a hydrophobic amino acid. For example substitution at position 3 with glutamic acid, ornithine, or norleucine substantially reduces or destroys glucagon receptor activity.

[0536] Maintained or enhanced activity at the glucagon receptor may be achieved by modifying the Gln at position 3 with a glutamine analog, as described herein. For example, glucagon agonists can comprise the amino acid sequence of any of SEQ ID NOs: 1243-1248, 1250, 1251, and 1253-1256.

[0537] Restoration of glucagon activity which has been reduced by amino acid modifications at positions 1 and 2 is provided by modifications that that stabilize the alpha helix structure of the C-terminal portion (amino acids 12-29) of the glucagon peptide or analog thereof. For example, an intramolecular bridge can be formed by a covalent bond between the side chains of two amino acids at positions i and i+4 or between positions j and j+3, or between positions k and k+7. In other embodiments, non-covalent interactions such as salt bridges can be formed between positively and negatively charged amino acids at these positions. In yet other embodiments, one or more α, α-disubstituted amino acids are inserted or substituted into this C-terminal portion (amino acids 12-29) at positions that retain the desired activity. For example, one, two, three or all of positions 16, 20, 21 or 24 are substituted with an α, α-disubstituted amino acid, e.g., Aib.

Modifications that Affect GLP-1 Activity

[0538] Enhanced activity at the GLP-1 receptor is provided by replacing the carboxylic acid of the C-terminal amino acid with a charge-neutral group, such as an amide or ester.

[0539] Enhanced activity at the GLP-1 receptor is also provided by stabilizing the alpha-helix structure in the C-terminal portion of glucagon (around amino acids 12-29), e.g., through formation of an intramolecular bridge between the side chains of two amino acids, or substitution and/or insertion of amino acids around positions 12-29 with an alpha helix-stabilizing amino acid (e.g., an α,α-disubstituted amino acid), as further described herein. In exemplary embodiments, the side chains of the amino acid pairs 12 and 16, 13 and 17, 16 and 20, 17 and 21, 20 and 24 or 24 and 28 (amino acid pairs in which i=12, 16, 20, or 24) are linked to one another and thus stabilize the glucagon alpha helix. In some embodiments, the bridge or linker is about 8 (or about 7-9) atoms in length, particularly when the bridge is between positions i and i+4. In some embodiments, the bridge or linker is about 6 (or about 5-7) atoms in length, particularly when the bridge is between positions j and j+3.

[0540] In some embodiments, intramolecular bridges are formed by (a) substituting the naturally occurring serine at position 16 with glutamic acid or with another negatively charged amino acid having a side chain with a length of 4 atoms, or alternatively with any one of glutamine, homoglutamic acid, or homocysteic acid, or a charged amino acid having a side chain containing at least one heteroatom, (e.g. N, O, S, P) and with a side chain length of about 4 (or 3-5) atoms, and (b) substituting the naturally occurring glutamine at position 20 with another hydrophilic amino acid having a side chain that is either charged or has an ability to hydrogen-bond, and is at least about 5 (or about 4-6) atoms in length, for example, lysine, citrulline, arginine, or ornithine. The side chains of such amino acids at positions 16 and 20 can form a salt bridge or can be covalently linked. In some embodiments the two amino acids are bound to one another to form a lactam ring.

[0541] In some embodiments, stabilization of the alpha helix structure in the C-terminal portion of the glucagon peptide is achieved through the formation of an intramolecular bridge other than a lactam bridge. For example, suitable covalent bonding methods include any one or more of olefin metathesis, lanthionine-based cyclization, disulfide bridge or modified sulfur-containing bridge formation, the use of α, ω-diaminoalkane tethers, the formation of metal-atom bridges, and other means of peptide cyclization are used to stabilize the alpha helix.

[0542] In yet other embodiments, one or more α, α-disubstituted amino acids are inserted or substituted into this C-terminal portion (amino acids 12-29) at positions that retain the desired activity. For example, one, two, three or all of positions 16, 20, 21 or 24 are substituted with an α, α-disubstituted amino acid, e.g., Aib.

[0543] Increased activity at the GLP-1 receptor is provided by an amino acid modification at position 20 as described herein.

[0544] Increased activity at the GLP-1 receptor is provided by adding GPSSGAPPPS (SEQ ID NO: 1095) or XGPSSGAPPPS (SEQ ID NO: 1096) to the C-terminus. GLP-1 activity in such analogs can be further increased by modifying the amino acid at position 18, 28 or 29, or at position 18 and 29, as described herein.

[0545] A further modest increase in GLP-1 potency is provided by modifying the amino acid at position 10 to be a large, aromatic amino acid residue, optionally Trp.

[0546] Reduced activity at the GLP-1 receptor is provided, e.g., by an amino acid modification at position 7 as described herein.

[0547] Potency at the GLP-1 receptor can be further enhanced by an alanine substitution for the native arginine at position 18.

[0548] Any of the modifications described above in reference to a Class 2 glucagon related peptide which increase GLP-1 receptor activity can be applied individually or in combination. Combinations of the modifications that increase GLP-1 receptor activity generally provide higher GLP-1 activity than any of such modifications taken alone. For example, the invention provides glucagon peptides that comprise modifications at position 16, at position 20, and at the C-terminal carboxylic acid group, optionally with a covalent bond between the amino acids at positions 16 and 20; glucagon peptides that comprise modifications at position 16 and at the C-terminal carboxylic acid group; glucagon peptides that comprise modifications at positions 16 and 20, optionally with a covalent bond between the amino acids at positions 16 and 20; and glucagon peptides that comprise modifications at position 20 and at the C-terminal carboxylic acid group.

Modifications that Improve DPP-IV Resistance

[0549] Modifications at position 1 and/or 2 can increase the peptide's resistance to dipeptidyl peptidase IV (DPP IV) cleavage. For example, position 1 and/or position 2 may be substituted with a DPP-IV resistant amino acid as described herein. In some embodiments, the amino acid at position 2 is substituted with N-methyl alanine.

[0550] It was observed that modifications at position 2 (e.g. Aib at position 2) and in some cases modifications at position 1 (e.g., DMIA at position 1) may reduce glucagon activity, sometimes significantly; surprisingly, this reduction in glucagon activity can be restored by stabilizing the alpha-helix structure in the C-terminal portion of glucagon (around amino acids 12-29), e.g., through formation of a covalent bond between the side chains of two amino acids, as described herein. In some embodiments, the covalent bond is between amino acids at positions “i” and “i+4”, or positions “j” and “j+3”, e.g., between positions 12 and 16, 16 and 20, 20 and 24, 24 and 28, or 17 and 20. In exemplary embodiments, this covalent bond is a lactam bridge between a glutamic acid at position 16 and a lysine at position 20. In some embodiments, this covalent bond is an intramolecular bridge other than a lactam bridge, as described herein.

Modifications that Reduce Degradation

[0551] In yet further exemplary embodiments, any of the Class 2 glucagon related peptides can be further modified to improve stability by modifying the amino acid at position 15 and/or 16 of SEQ ID NO: 1001 to reduce degradation of the peptide over time, especially in acidic or alkaline buffers. Such modifications reduce cleavage of the Asp15-Ser16 peptide bond. In exemplary embodiments, the amino acid modification at position 15 is a deletion or substitution of Asp with glutamic acid, homoglutamic acid, cysteic acid or homocysteic acid. In other exemplary embodiments, the amino acid modification at position 16 is a deletion or substitution of Ser with Thr or Aib. In other exemplary embodiments, Ser at position 16 is substituted with glutamic acid or with another negatively charged amino acid having a side chain with a length of 4 atoms, or alternatively with any one of glutamine, homoglutamic acid, or homocysteic acid.

[0552] In some embodiments, the methionine residue present at position 27 of the native peptide is modified, e.g. by deletion or substitution. Such modifications may prevent oxidative degradation of the peptide. In some embodiments, the Met at position 27 is substituted with leucine, isoleucine or norleucine. In some specific embodiments, Met at position 27 is substituted with leucine or norleucine.

[0553] In some embodiments, the Gln at position 20 and/or 24 is modified, e.g. by deletion or substitution. Such modifications can reduce degradation that occurs through deamidation of Gln. In some embodiments, the Gln at position 20 and/or 24 is substituted with Ser, Thr, Ala or Aib. In some embodiments the Gln at position 20 and/or 24 is substituted with Lys, Arg, Orn, or Citrulline.

[0554] In some embodiments, the Asp at position 21 is modified, e.g. by deletion or substitution. Such modifications can reduce degradation that occurs through dehydration of Asp to form a cyclic succinimide intermediate followed by isomerization to iso-aspartate. In some embodiments, position 21 is substituted with Glu, homoglutamic acid or homocysteic acid. In some specific embodiments, position 21 is substituted with Glu.

### Stabilization of the Alpha Helix Structure

[0555] Stabilization of the alpha-helix structure in the C-terminal portion of the Class 2 glucagon related peptide (around amino acids 12-29) provides enhanced GLP-1 and/or GIP activity and restores glucagon activity which has been reduced by amino acid modifications at positions 1 and/or 2. The alpha helix structure can be stabilized by, e.g., formation of a covalent or non-covalent intramolecular bridge, or substitution and/or insertion of amino acids around positions 12-29 with an alpha helix-stabilizing amino acid (e.g., an α,α-disubstituted amino acid). Stabilization of the alpha-helix structure of a GIP agonist may be accomplished as described herein.

### Acylation and Alkylation

[0556] In accordance with some embodiments, the glucagon peptides disclosed herein are modified to comprise an acyl group or alkyl group, e.g., an acyl or alkyl group which is non-native to a naturally-occurring amino acid as described herein. Acylation or alkylation can increase the half-life of the glucagon peptides in circulation. Acylation or alkylation can advantageously delay the onset of action and/or extend the duration of action at the glucagon and/or GLP-1 receptors and/or improve resistance to proteases such as DPP-IV and/or improve solubility. Activity at the glucagon and/or GLP-1 and/or GIP receptors of the glucagon peptide may be maintained after acylation. In some embodiments, the potency of the acylated glucagon peptides is comparable to the unacylated versions of the glucagon peptides. Class 2 glucagon related peptides may be acylated or alkylated at the same amino acid position where a hydrophilic moiety is linked, or at a different amino acid position, as described herein.

[0557] In some embodiments, the invention provides a glucagon peptide modified to comprise an acyl group or alkyl group covalently linked to the amino acid at position 10 of the glucagon peptide. The glucagon peptide may further comprise a spacer between the amino acid at position 10 of the glucagon peptide and the acyl group or alkyl group. In some embodiments, the acyl group is a fatty acid or bile acid, or salt thereof, e.g. a C4 to C30 fatty acid, a C8 to C24 fatty acid, cholic acid, a C4 to C30 alkyl, a C8 to C24 alkyl, or an alkyl comprising a steroid moiety of a bile acid. The spacer is any moiety with suitable reactive groups for attaching acyl or alkyl groups. In exemplary embodiments, the spacer comprises an amino acid, a dipeptide, a tripeptide, a hydrophilic bifunctional, or a hydrophobic bifunctional spacer. In some embodiments, the spacer is selected from the group consisting of: Trp, Glu, Asp, Cys and a spacer comprising NH₂(CH₂CH₂O)ₙ(CH₂)ₘCOOH, wherein m is any integer from 1 to 6 and n is any integer from 2 to 12. Such acylated or alkylated glucagon peptides may also further comprise a hydrophilic moiety, optionally a polyethylene glycol. Any of the foregoing glucagon peptides may comprise two acyl groups or two alkyl groups, or a combination thereof.

### Conjugates and Fusions

[0558] The GIP agonist can be linked, optionally via covalent bonding and optionally via a linker, to a conjugate moiety as described herein.

[0559] In other embodiments, the second peptide is XGPSSGAPPPS (SEQ ID NO: 1096), wherein X is selected from one of the 20 common amino acids, e.g., glutamic acid, aspartic acid or glycine. In some embodiments X represents an amino acid, for example Cys, that further comprises a hydrophilic moiety covalently linked to the side chain of that amino acid. Such C-terminal extensions improve solubility and also can improve GIP or GLP-1 activity. In some embodiments wherein the glucagon peptide further comprises a carboxy terminal extension, the carboxy terminal amino acid of the extension ends in an amide group or an ester group rather than a carboxylic acid.

[0560] In some embodiments, e.g., in glucagon peptides which comprise the C-terminal extension, the threonine at position 29 of the native glucagon peptide is replaced with a glycine. For example, a glucagon peptide having a glycine substitution for threonine at position 29 and comprising the C-terminal extension of GPSSGAPPPS (SEQ ID NO: 1095) is four times as potent at the GLP-1 receptor as native glucagon modified to comprise the same C-terminal extension. This T29G substitution can be used in conjunction with other modifications disclosed herein to enhance the affinity of the glucagon peptides for the GLP-1 receptor. For example, the T29G substitution can be combined with the S16E and N20K amino acid substitutions, optionally with a lactam bridge between amino acids 16 and 20, and optionally with addition of a PEG chain as described herein.

[0561] In some embodiments an amino acid is added to the C-terminus, and the additional amino acid is selected from the group consisting of glutamic acid, aspartic acid and glycine.

Modifications that Enhance Solubility

[0562] In another embodiment, the solubility of any of the glucagon peptides can be improved by amino acid substitutions and/or additions that introduce a charged amino acid into the C-terminal portion of the peptide, preferably at a position C-terminal to position 27 of SEQ ID NO: 1001. Optionally, one, two or three charged amino acids may be introduced within the C-terminal portion, preferably C-terminal to position 27. In some embodiments the native amino acid(s) at positions 28 and/or 29 are substituted with one or two charged amino acids, and/or in a further embodiment one to three charged amino acids are also added to the C-terminus of the peptide. In exemplary embodiments, one, two or all of the charged amino acids are negatively charged. In some embodiments, the negatively charged (acidic amino acid) is aspartic acid or glutamic acid.

[0563] Additional modifications, e.g. conservative substitutions, may be made to the glucagon peptide that still allow it to retain GIP activity (and optionally GLP-1 activity and/or glucagon activity).

### Other Modifications

[0564] Any of the modifications described above in reference to a Class 2 peptide which increase or decrease GIP activity, which increase or decrease glucagon receptor activity, and which increase GLP-1 receptor activity can be applied individually or in combination. Any of the modifications described above in reference to a Class 2 glucagon related peptide can also be combined with other modifications that confer other desirable properties, such as increased solubility and/or stability and/or duration of action, as described herein with regard to Class 2 glucagon related peptides. Alternatively, any of the modifications described above in reference to Class 2 glucaton related peptides can be combined with other modifications described herein in reference to Class 2 glucagon related peptides that do not substantially affect solubility or stability or activity. Exemplary modifications include but are not limited to:

[0565] (A) Improving solubility, for example, by introducing one, two, three or more charged amino acid(s) to the C-terminal portion of native glucagon, preferably at a position C-terminal to position 27. Such a charged amino acid can be introduced by substituting a native amino acid with a charged amino acid, e.g. at positions 28 or 29, or alternatively by adding a charged amino acid, e.g. after position 27, 28 or 29. In exemplary embodiments, one, two, three or all of the charged amino acids are negatively charged. In other embodiments, one, two, three or all of the charged amino acids are positively charged. Such modifications increase solubility, e.g. provide at least 2-fold, 5-fold, 10-fold, 15-fold, 25-fold, 30-fold or greater solubility relative to native glucagon at a given pH between about 5.5 and 8, e.g., pH 7, when measured after 24 hours at 25° C.

[0566] (B) Increasing solubility and duration of action or half-life in circulation by addition of a hydrophilic moiety such as a polyethylene glycol chain, as described herein, e.g. at position 16, 17, 20, 21, 24 or 29, within a C-terminal extension, or at the C-terminal amino acid of the peptide,

[0567] (C) Increasing solubility and/or duration of action or half-life in circulation and/or delaying the onset of action by acylation or alkylation of the glucagon peptide, as described herein;

[0568] (D) Increasing duration of action or half-life in circulation through introducing resistance to dipeptidyl peptidase IV (DPP IV) cleavage by modification of the amino acid at position 1 or 2 as described herein.

[0569] (E) Increasing stability by modification of the Asp at position 15, for example, by deletion or substitution with glutamic acid, homoglutamic acid, cysteic acid or homocysteic acid. Such modifications can reduce degradation or cleavage at a pH within the range of 5.5 to 8, for example, retaining at least 75%, 80%, 90%, 95%, 96%, 97%, 98% or 99%, up to 100% of the original peptide after 24 hours at 25° C. Such modifications reduce cleavage of the peptide bond between Asp15-Ser16.

[0570] (F) Increasing stability by modification of the Ser at position 16, for example by substitution with Thr or Aib. Such modifications also reduce cleavage of the peptide bond between Asp15-Ser16.

[0571] (G) Increasing stability by modification of the methionine at position 27, for example, by substitution with leucine or norleucine. Such modifications can reduce oxidative degradation. Stability can also be increased by modification of the Gln at position 20 or 24, e.g. by substitution with Ser, Thr, Ala or Aib. Such modifications can reduce degradation that occurs through deamidation of Gln. Stability can be increased by modification of Asp at position 21, e.g. by substitution with Glu. Such modifications can reduce degradation that occurs through dehydration of Asp to form a cyclic succinimide intermediate followed by isomerization to iso-aspartate.

[0572] (H) Non-conservative or conservative substitutions, additions or deletions that do not substantially affect activity, for example, conservative substitutions at one or more of positions 2, 5, 9, 10, 11, 12, 13, 14, 15, 16, 17, 18, 19, 20, 21, 24, 27, 28 or 29; substitution of one or more of these positions with Ala; deletion of amino acids at one or more of positions 27, 28 or 29; or deletion of amino acid 29 optionally combined with a C-terminal amide or ester in place of the C-terminal carboxylic acid group; substitution of Lys at position 12 with Arg; substitution of Tyr at position 10 with Val or Phe;

[0573] Preservation of activity after pegylation is provided by the addition of GPSSGAPPPS (SEQ ID NO: 1095) to the C-terminus

[0574] Some positions of the native glucagon peptide can be modified while retaining at least some of the activities of the parent peptide. Accordingly, applicants anticipate that one or more of the amino acids located at positions at positions 2, 5, 10, 11, 12, 13, 14, 17, 18, 19, 20, 21, 24, 27, 28 or 29 can be substituted with an amino acid different from that present in the native glucagon peptide, and still retain activity at the glucagon receptor.

[0575] In some embodiments, position 18 is substituted with an amino acid selected from the group consisting of Ala, Ser, or Thr. In some embodiments the amino acid at position 20 is substituted with Ser, Thr, Lys, Arg, Orn, Citrulline or Aib. In some embodiments, position 21 is substituted with Glu, homoglutamic acid or homocysteic acid. In some embodiments, the glucagon peptide comprises 1 to 10 amino acid modifications selected from positions 16, 17, 18, 20, 21, 23, 24, 27, 28 and 29. In exemplary embodiments, the modifications are one or more amino acid substitutions selected from the group consisting of Gln17, Ala18, Glu21, Ile23, Ala24, Val27 and Gly29. In some embodiments, 1 to 2 amino acids selected from positions 17-26 differ from the parent peptide. In other embodiments, 1 to 2 amino acids selected from positions 17-22 differ from the parent peptide. In yet other embodiments, the modifications are Gln17, Ala18, Glu21, Ile23 and Ala24.

[0576] In some embodiments, one or more amino acids is added to the carboxy terminus of the glucagon peptide. The amino acid is typically selected from one of the 20 common amino acids, and in some embodiments the amino acid has an amide group in place of the carboxylic acid of the native amino acid. In exemplary embodiments the added amino acid is selected from the group consisting of glutamic acid and aspartic acid and glycine.

Other Modifications that do not Destroy Activity Include W10 or R20.

[0577] In some embodiments, the Class 2 glucagon related peptides disclosed herein are modified by truncation of the C-terminus by one or two amino acid residues yet retain similar activity and potency at the glucagon, GLP-1 and/or GIP receptors. In this regard, the amino acid at position 29 and/or 28 can be deleted.

### Exemplary Embodiments

[0578] In accordance with some embodiments of the invention, the analog of glucagon (SEQ ID NO: 1001) having GIP agonist activity comprises SEQ ID NO: 1001 with (a) an amino acid modification at position 1 that confers GIP agonist activity, (b) a modification which stabilizes the alpha helix structure of the C-terminal portion (amino acids 12-29) of the analog, and (c) optionally, 1 to 10 (e.g., 1, 2, 3, 4, 5, 6, 7, 8, 9, 10) further amino acid modifications. In some embodiments, the analog exhibits at least about 1% activity of native GIP at the GIP receptor or any other activity level at the GIP receptor described herein.

[0579] In certain embodiments, the modification which stabilizes the alpha helix structure is one which provides or introduces an intramolecular bridge, including, for example, a covalent intramolecular bridge, such as any of those described herein. The covalent intramolecular bridge in some embodiments is a lactam bridge. The lactam bridge of the analog of these embodiments can be a lactam bridge as described herein. See, e.g., the teachings of lactam bridges under the section “Stabilization of the Alpha Helix Structure.” For example, the lactam bridge may be one which is between the side chains of amino acids at positions i and i+4 or between the side chains of amino acids at positions j and j+3, wherein i is 12, 13, 16, 17, 20 or 24, and wherein j is 17. In certain embodiments, the lactam bridge can be between the amino acids at positions 16 and 20, wherein one of the amino acids at positions 16 and 20 is substituted with Glu and the other of the amino acids at positions 16 and 20 is substituted with Lys.

[0580] In alternative embodiments, the modification which stabilizes the alpha helix structure is the introduction of one, two, three, or four α,α-disubstituted amino acids at position(s) 16, 20, 21, and 24 of the analog. In some embodiments, the α,α-disubstituted amino acid is Aib. In certain aspects, the α,α-disubstituted amino acid (e.g., Aib) is at position 20 and the amino acid at position 16 is substituted with a positive-charged amino acid, such as, for example, an amino acid of Formula IV, which is described herein. The amino acid of Formula IV may be homoLys, Lys, Orn, or 2,4-diaminobutyric acid (Dab).

[0581] In specific aspects of the invention, the amino acid modification at position 1 is a substitution of His with an amino acid lacking an imidazole side chain, e.g. a large, aromatic amino acid (e.g., Tyr).

[0582] In certain aspects, the analog of glucagon comprises amino acid modifications at one, two or all of positions 27, 28 and 29. For example, the Met at position 27 can be substituted with a large aliphatic amino acid, optionally Leu, the Asn at position 28 can be substituted with a small aliphatic amino acid, optionally Ala, the Thr at position 29 can be substituted with a small aliphatic amino acid, optionally Gly, or a combination of two or three of the foregoing. In specific embodiments, the analog of glucagon comprises Leu at position 27, Ala at position 28, and Gly or Thr at position 29.

[0583] In certain embodiments of the invention, the analog of glucagon comprises an extension of 1 to 21 amino acids C-terminal to the amino acid at position 29. The extension can comprise the amino acid sequence of SEQ ID NO: 1095 or 1096, for instance. Additionally or alternatively, the analog of glucagon can comprise an extension of which 1-6 amino acids of the extension are positive-charged amino acids. The positive-charged amino acids may be amino acids of Formula IV, including, but not limited to Lys, homoLys, Orn, and Dab.

[0584] The analog of glucagon in some embodiments is acylated or alkylated as described herein. For instance, the acyl or alkyl group may be attached to the analog of glucagon, with or without a spacer, at position 10 or 40 of the analog, as further described herein. The analog may additionally or alternatively be modified to comprise a hydrophilic moiety as further described herein. Furthermore, in some embodiments, the analog comprises any one or a combination of the following modifications:

[0585] (a) Ser at position 2 substituted with D-Ser, Ala, D-Ala, Gly, N-methyl-Ser, Aib, Val, or α-amino-N-butyric acid;

[0586] (b) Tyr at position 10 substituted with Trp, Lys, Orn, Glu, Phe, or Val:

[0587] (c) Linkage of an acyl group to a Lys at position 10;

[0588] (d) Lys at position 12 substituted with Arg or Ile;

[0589] (e) Ser at position 16 substituted with Glu, Gln, homoglutamic acid, homocysteic acid, Thr, Gly, or Aib;

[0590] (f) Arg at position 17 substituted with Gln;

[0591] (g) Arg at position 18 substituted with Ala, Ser, Thr, or Gly;

[0592] (h) Gln at position 20 substituted with Ser, Thr, Ala, Lys, Citrulline, Arg, Orn, or Aib;

[0593] (i) Asp at position 21 substituted with Glu, homoglutamic acid, homocysteic acid;

[0594] (j) Val at position 23 substituted with Ile;

[0595] (k) Gln at position 24 substituted with Asn, Ser, Thr, Ala, or Aib;

[0596] (l) and a conservative substitution at any of positions 2 5, 9, 10, 11, 12, 13, 14, 15, 16, 8 19 20, 21, 24, 27, 28, and 29.

[0597] In exemplary embodiments, the analog of glucagon (SEQ ID NO: 1001) having GIP agonist activity comprises the following modifications:

[0598] (a) an amino acid modification at position 1 that confers GIP agonist activity,

[0599] (b) a lactam bridge between the side chains of amino acids at positions i and i+4 or between the side chains of amino acids at positions j and j+3, wherein i is 12, 13, 16, 17, 20 or 24, and wherein j is 17,

[0600] (c) amino acid modifications at one, two or all of positions 27, 28 and 29, e.g., amino acid modifications at position 27 and/or 28, and

[0601] (d) 1-9 or 1-6 further amino acid modifications, e.g. 1, 2, 3, 4, 5, 6, 7, 8 or 9 further amino acid modifications,

[0602] and the EC₅₀ of the analog for GIP receptor activation is about 10 nM or less.

[0603] The lactam bridge of the analog of these embodiments can be a lactam bridge as described herein. See, e.g., the teachings of lactam bridges under the section “Stabilization of the Alpha Helix Structure.” For example, the lactam bridge can be between the amino acids at positions 16 and 20, wherein one of the amino acids at positions 16 and 20 is substituted with Glu and the other of the amino acids at positions 16 and 20 is substituted with Lys.

[0604] In accordance with these embodiments, the analog can comprise, for example, the amino acid sequence of any of SEQ ID NOs: 1005-1094.

[0605] In other exemplary embodiments, the analog of glucagon (SEQ ID NO: 1001) having GIP agonist activity comprises the following modifications:

[0606] (a) an amino acid modification at position 1 that confers GIP agonist activity,

[0607] (b) one, two, three, or all of the amino acids at positions 16, 20, 21, and 24 of the analog is substituted with an α,α-disubstituted amino acid,

[0608] (c) amino acid modifications at one, two or all of positions 27, 28 and 29, e.g., amino acid modifications at position 27 and/or 28, and

[0609] (d) 1-9 or 1-6 further amino acid modifications, e.g. 1, 2, 3, 4, 5, 6, 7, 8 or 9 further amino acid modifications,

[0610] and the EC₅₀ of the analog for GIP receptor activation is about 10 nM or less.

[0611] The α,α-disubstituted amino acid of the analog of these embodiments can be any α,α-disubstituted amino acid, including, but not limited to, amino iso-butyric acid (Aib), an amino acid disubstituted with the same or a different group selected from methyl, ethyl, propyl, and n-butyl, or with a cyclooctane or cycloheptane (e.g., 1-aminocyclooctane-1-carboxylic acid). In certain embodiments, the α,α-disubstituted amino acid is Aib. In certain embodiments, the amino acid at position 20 is substituted with an α,α-disubstituted amino acid, e.g., Aib.

[0612] In accordance with these embodiments, the analog can comprise, for example, the amino acid sequence of any of SEQ ID NOs: 1099-1141, 1144-1164, 1166-1169, and 1173-1178.

[0613] In yet other exemplary embodiments, the analog of glucagon (SEQ ID NO: 1001) having GIP agonist activity comprises the following modifications:

[0614] (a) an amino acid modification at position 1 that confers GIP agonist activity,

[0615] (b) an amino acid substitution of Ser at position 16 with an amino acid of Formula IV:

[chemical structure]

[0616] wherein n is 1 to 16, or 1 to 10, or 1 to 7, or 1 to 6, or 2 to 6, each of R1 and R2 is independently selected from the group consisting of H, C1-C18 alkyl, (C1-C18 alkyl)OH, (C1-C18 alkyl)NH2, (C1-C18 alkyl)SH, (C0-C4 alkyl)(C3-C6)cycloalkyl, (C0-C4 alkyl)(C2-C5 heterocyclic), (C0-C4 alkyl)(C6-C10 aryl)R7, and (C1-C4 alkyl)(C3-C9 heteroaryl), wherein R7 is H or OH, and the side chain of the amino acid of Formula IV comprises a free amino group,

[0617] (c) an amino acid substitution of the Gln at position 20 with an alpha, alpha-disubstituted amino acid,

[0618] (d) amino acid modifications at one, two or all of positions 27, 28 and 29, e.g., amino acid modifications at position 27 and/or 28, and

[0619] (e) 1-9 or 1-6 further amino acid modifications, e.g. 1, 2, 3, 4, 5, 6, 7, 8 or 9 further amino acid modifications,

[0620] and the EC₅₀ of the analog for GIP receptor activation is about 10 nM or less.

[0621] The amino acid of Formula IV of the analog of these embodiments may be any amino acid, such as, for example, the amino acid of Formula IV, wherein n is 1, 2, 3, 4, 5, 6, 7, 8, 9, 10, 11, 12, 13, 14, 15, or 16. In certain embodiments, n is 2, 3, 4, or 5, in which case, the amino acid is Dab, Orn, Lys, or homoLys respectively.

[0622] The alpha, alpha-disubstituted amino acid of the analog of these embodiments may be any alpha, alpha-disubstituted amino acid, including, but not limited to, amino iso-butyric acid (Aib), an amino acid disubstituted with the same or a different group selected from methyl, ethyl, propyl, and n-butyl, or with a cyclooctane or cycloheptane (e.g., 1-aminocyclooctane-1-carboxylic acid). In certain embodiments, the alpha, alpha-disubstituted amino acid is Aib.

[0623] In accordance with these embodiments, the analog can comprise, for example, the amino acid sequence of any of SEQ ID NOs: 1099-1165.

[0624] In yet other exemplary embodiments, the analog of glucagon (SEQ ID NO: 1001) having GIP agonist activity comprises:

[0625] (a) an amino acid modification at position 1 that confers GIP agonist activity, and

[0626] (b) an extension of about 1 to about 21 amino acids C-terminal to the amino acid at position 29, wherein at least one of the amino acids of the extension is acylated or alkylated,

[0627] wherein the EC₅₀ of the analog for GIP receptor activation is about 10 nM or less.

[0628] In some embodiments, the acylated or alkylated amino acid is an amino acid of Formula I, II, or III. In more specific embodiments, the amino acid of Formula I is Dab, Orn, Lys, or homoLys. Also, in some embodiments, the extension of about 1 to about 21 amino acids comprises the amino acid sequence of GPSSGAPPPS (SEQ ID NO: 1095) or XGPSSGAPPPS (SEQ ID NO: 1096), wherein X is any amino acid, or GPSSGAPPPK (SEQ ID NO: 1170) or XGPSSGAPPPK (SEQ ID NO: 1171) or XGPSSGAPPPSK (SEQ ID NO: 1172), wherein X is Gly or a small, aliphatic or non-polar or slightly polar amino acid. In some embodiments, the about 1 to about 21 amino acids may comprise sequences containing one or more conservative substitutions relative to SEQ ID NO: 1095, 1096, 1170, 1171 or 1172. In some embodiments, the acylated or alkylated amino acid is located at position 37, 38, 39, 40, 41, 42, or 43 of the C-terminally-extended analog. In certain embodiments, the acylated or alkylated amino acid is located at position 40 of the C-terminally extended analog.

[0629] In some embodiments, the analog having GIP agonist activity further comprises amino acid modifications at one, two or all of positions 27, 28 and 29, e.g., amino acid modifications at position 27 and/or 28.

[0630] In any of the above exemplary embodiments, the amino acid modification at position 1 that confers GIP agonist activity can be a substitution of His with an amino acid lacking an imidazole side chain. The amino acid modification at position 1 can, for example, be a substitution of His with a large, aromatic amino acid. In some embodiments, the large, aromatic amino acid is any of those described herein, including, for example, Tyr.

[0631] In certain aspects, the analog does not comprise an amino acid modification at position 1 which modification confers GIP agonist activity. In some aspects, the amino acid at position 1 is not a large, aromatic amino acid, e.g., Tyr. In some embodiments, the amino acid at position 1 is an amino acid comprising an imidazole ring, e.g., His, analogs of His. In certain embodiments, the analog is not any of the compounds disclosed in International Patent Application Publication No. WO 2010/011439. In certain aspects, the analog comprises the amino acid sequence of any of SEQ ID NOs: 1263-1275.

[0632] Also, with regard to the above exemplary embodiments, amino acid modifications at one, two, or all of positions 27, 28, and 29 can be any of the modifications at these positions described herein. For example, the Met at position 27 can be substituted with a large aliphatic amino acid, optionally Leu, the Asn at position 28 can be substituted with a small aliphatic amino acid, optionally Ala, and/or the Thr at position 29 can be substituted with a small aliphatic amino acid, optionally Gly. Alternatively, the analog can comprise such amino acid modifications at position 27 and/or 28.

[0633] The analog of the above exemplary embodiments can further comprise 1-9 or 1-6 further, additional amino acid modifications, e.g. 1, 2, 3, 4, 5, 6, 7, 8 or 9 further amino acid modifications, such as, for example, any of the modifications described herein which increase or decrease the activity at any of the GIP, GLP-1, and glucagon receptors, improve solubility, improve duration of action or half-life in circulation, delay the onset of action, or increase stability. The analog can further comprise, for example, an amino acid modification at position 12, optionally, a substitution with Ile, and/or amino acid modifications at positions 17 and 18, optionally substitution with Q at position 17 and A at position 18, and/or an addition of GPSSGAPPPS (SEQ ID NO: 1095) or XGPSSGAPPPS (SEQ ID NO: 1096), or sequences containing one or more conservative substitutions relative to SEQ ID NO: 1095 or 1096, to the C-terminus. The analog can comprise one or more of the following modifications:

[0634] (i) Ser at position 2 substituted with D-Ser, Ala, D-Ala, Gly, N-methyl-Ser, Aib, Val, or α-amino-N-butyric acid;

[0635] (ii) Tyr at position 10 substituted with Trp, Lys, Orn, Glu, Phe, or Val;

[0636] (iii) Linkage of an acyl group to a Lys at position 10;

[0637] (iv) Lys at position 12 substituted with Arg;

[0638] (v) Ser at position 16 substituted with Glu, Gln, homoglutamic acid, homocysteic acid, Thr, Gly, or Aib;

[0639] (vi) Arg at position 17 substituted with Gln;

[0640] (vii) Arg at position 18 substituted with Ala, Ser, Thr, or Gly;

[0641] (viii) Gln at position 20 substituted with Ala, Ser, Thr, Lys, Citrulline, Arg, Orn, or Aib;

[0642] (ix) Asp at position 21 substituted with Glu, homoglutamic acid, homocysteic acid;

[0643] (x) Val at position 23 substituted with Ile;

[0644] (xi) Gln at position 24 substituted with Asn, Ala, Ser, Thr, or Aib; and

[0645] (xii) a conservative substitution at any of positions 2, 5, 9, 10, 11, 12, 13, 14, 15, 16, 17, 18, 19, 20, 21, 24, 27, 28, and 29.

[0646] The analog in some embodiments comprise a combination of the modifications (i) through (xii). Alternatively or additionally, the analog can comprise an amino acid modification at position 3 (e.g., an amino acid substitution of Gln with Glu), wherein the analog has less than 1% of the activity of glucagon at the glucagon receptor. Alternatively or additionally, the analog can comprise an amino acid modification at position 7 (e.g., an amino acid substitution of Thr with an amino acid lacking a hydroxyl group, e.g., Abu or Ile), wherein the analog has less than about 10% of the activity of GLP-1 at the GLP-1 receptor.

[0647] With regard to the exemplary embodiments, the analog can be covalently linked to a hydrophilic moiety. In some embodiments, the analog is covalently linked to the hydrophilic moiety at any of amino acid positions 16, 17, 20, 21, 24, 29, 40, or the C-terminus. In certain embodiments, the analog comprises a C-terminal extension (e.g., an amino acid sequence of SEQ ID NO: 1095) and an addition of an amino acid comprising the hydrophilic moiety, such that the hydrophilic moiety is covalently linked to the analog at position 40.

[0648] In some embodiments, the hydrophilic moiety is covalently linked to a Lys, Cys, Orn, homocysteine, or acetyl-phenylalanine of the analog. The Lys, Cys, Orn, homocysteine, or acetyl-phenylalanine may be an amino acid that is native to the glucagon sequence (SEQ ID NO: 1001) or it may be an amino acid which is replacing a native amino acid of SEQ ID NO: 1001. In some embodiments, wherein the hydrophilic moiety is attached to a Cys, the linkage to the hydrophilic moiety can comprise the structure

[chemical structure]

[0649] With regard to the analogs comprising a hydrophilic moiety, the hydrophilic moiety may be any of those described herein. See, e.g., the teachings under the section “Linkage of hydrophilic moieties.” In some embodiments, the hydrophilic moiety is a polyethylene glycol (PEG). The PEG in certain embodiments has a molecular weight of about 1,000 Daltons to about 40,000 Daltons, e.g., about 20,000 Daltons to about 40,000 Daltons.

[0650] With regard to the exemplary embodiments, the analog can comprise a modified amino acid in which the side chain is covalently linked to an acyl or alkyl group (e.g., an acyl or alkyl group which is non-native to a naturally-occurring amino acid). The acylated or alkylated analog can be in accordance with acylated or alkylated peptides described in the section “Acylation and alkylation.” In some embodiments, the acyl group is a C4 to a C30 fatty acyl group, such as, for example, a C10 fatty acyl or alkyl group, a C12 fatty acyl or alkyl group, a C14 fatty acyl or alkyl group, a C16 fatty acyl or alkyl group, a C18 fatty acyl or alkyl group, a C20 acyl or alkyl group, or a C22 acyl or alkyl group. The acyl or alkyl group may be covalently attached to any amino acid of the analog, including, but not limited to the amino acid at position 10 or 40, or the C-terminal amino acid. In certain embodiments, the analog comprises a C-terminal extension (e.g., an amino acid sequence of SEQ ID NO: 1095) and an addition of an amino acid comprising the acyl or alkyl group, such that the acyl or alkyl group is covalently linked to the analog at position 40. In some embodiments, the acyl or alkyl group is covalently linked to the side chain of an amino acid of Formula I, II, or III, e.g., a Lys residue. The acyl or alkyl group may be covalently linked to an amino acid which is native to the glucagon sequence (SEQ ID NO: 1001) or may be linked to an amino acid which is added to the sequence of SEQ ID NO: 1001 or to the sequence of SEQ ID NO: 1001 followed by SEQ ID NO: 1095 (at the N- or C-terminus) or may be linked to an amino acid which replaces a native amino acid, e.g., the Tyr at position 10 of SEQ ID NO: 1001.

[0651] In the above exemplary embodiments, wherein the analog comprises an acyl or alkyl group, the analog may be attached to the acyl or alkyl group via a spacer, as described herein. The spacer, for example, may be 3 to 10 atoms in length and may be, for instance, an amino acid

[0652] (e.g., 6-amino hexanoic acid, any amino acid described herein), a dipeptide (e.g., Ala-Ala, βAla-βAla, Leu-Leu, Pro-Pro, γ-Glu-γ-Glu), a tripeptide, or a hydrophilic or hydrophobic bifunctional spacer. In certain aspects, the total length of the spacer and the acyl or alkyl group is about 14 to about 28 atoms. In some embodiments, the amino acid spacer is not γ-Glu. In some embodiments, the dipeptide spacer is not γ-Glu-γ-Glu.

[0653] In still further exemplary embodiments, the analog of glucagon having GIP agonist activity comprises the amino acid sequence according to any one of SEQ ID NOs: 1227, 1228, 1229 or 1230 that further comprises the following modifications:

[0654] (a) optionally, an amino acid modification at position 1 that confers GIP agonist activity,

[0655] (b) an extension of about 1 to about 21 amino acids C-terminal to the amino acid at position 29, wherein at least one of the amino acids of the extension is acylated or alkylated, and

[0656] (d) up to 6 further amino acid modifications,

[0657] wherein the EC₅₀ of the analog for GIP receptor activation is about 10 nM or less.

[0658] In some aspects, the acylated or alkylated amino acid is an amino acid of Formula I, II, or III. In more specific embodiments, the amino acid of Formula I is Dab, Orn, Lys, or homoLys. Also, in some embodiments, the about 1 to about 21 amino acids comprises the amino acid sequence of GPSSGAPPPS (SEQ ID NO: 1095) or XGPSSGAPPPS (SEQ ID NO: 1096), wherein X is any amino acid, or GPSSGAPPPK (SEQ ID NO: 1170) or XGPSSGAPPPK (SEQ ID NO: 1171) or XGPSSGAPPPSK (SEQ ID NO: 1172), wherein X is Gly or a small, aliphatic or non-polar or slightly polar amino acid. In some embodiments, the about 1 to about 21 amino acids may comprise sequences containing one or more conservative substitutions relative to SEQ ID NO: 1095, 1096, 1170, 1171 or 1172. In some embodiments, the acylated or alkylated amino acid is located at position 37, 38, 39, 40, 41, 42, or 43 of the C-terminally-extended analog. In certain embodiments, the acylated or alkylated amino acid is located at position 40 of the C-terminally extended analog.

[0659] In any of the above exemplary embodiments, the amino acid at position 1 that confers GIP agonist activity can be an amino acid lacking an imidazole side chain. The amino acid at position 1 can, for example, be a large, aromatic amino acid. In some embodiments, the large, aromatic amino acid is any of those described herein, including, for example, Tyr.

[0660] The analog of the above exemplary embodiments can further comprise 1-6 further amino acid modifications, such as, for example, any of the modifications described herein which increase or decrease the activity at any of the GIP, GLP-1, and glucagon receptors, improve solubility, improve duration of action or half-life in circulation, delay the onset of action, or increase stability.

[0661] In certain aspects, glucagon analogs described in the above exemplary embodiment, comprise further amino acid modifications at one, two or all of positions 27, 28 and 29. Modifications at these positions can be any of the modifications described herein relative to these positions. For example, relative to SEQ ID NO: 1227, 1228, 1229 or 1230, position 27 can be substituted with a large aliphatic amino acid (e.g., Leu, Ile or norleucine) or Met, position 28 can be substituted with another small aliphatic amino acid (e.g., Gly or Ala) or Asn, and/or position 29 can be substituted with another small aliphatic amino acid (e.g., Ala or Gly) or Thr. Alternatively, the analog can comprise such amino acid modifications at position 27 and/or 28.

[0662] The analog can further comprise one or more of the following additional modifications:

[0663] (i) the amino acid at position 2 is any one of D-Ser, Ala, D-Ala, Gly, N-methyl-Ser, Aib, Val, or α-amino-N-butyric acid;

[0664] (ii) the amino acid at position 10 is Tyr, Trp, Lys, Orn, Glu, Phe, or Val;

[0665] (iii) linkage of an acyl group to a Lys at position 10;

[0666] (iv) the amino acid at position 12 is Ile, Lys or Arg;

[0667] (v) the amino acid at position 16 is any one of Ser, Glu, Gln, homoglutamic acid, homocysteic acid, Thr, Gly, or Aib;

[0668] (vi) the amino acid at position 17 is Gln or Arg;

[0669] (vii) the amino acid at position 18 is any one of Ala, Arg, Ser, Thr, or Gly;

[0670] (viii) the amino acid at position 20 is any one of Ala, Ser, Thr, Lys, Citrulline, Arg, Orn, or Aib or another alpha, alpha-disubstituted amino acid;

[0671] (ix) the amino acid at position 21 is any one of Glu, Asp, homoglutamic acid, homocysteic acid;

[0672] (x) the amino acid at position 23 is Val or Ile;

[0673] (xi) the amino acid at position 24 is any one of Gln, Asn, Ala, Ser, Thr, or Aib; and

[0674] (xii) one or more conservative substitutions at any of positions 2, 5, 9, 10, 11, 12, 13, 14, 15, 16, 17, 18, 19, 20, 21, 24, 27, 28, and 29.

[0675] The analog in some embodiments comprise a combination of the modifications (i) through (xii). Alternatively or additionally, the analog can comprise an amino acid modification at position 3 (e.g., an amino acid substitution of Gln with Glu), wherein the analog has less than 1% of the activity of glucagon at the glucagon receptor. Alternatively or additionally, the analog can comprise an amino acid modification at position 7 (e.g., an amino acid substitution of Thr with an amino acid lacking a hydroxyl group, e.g., Abu or Ile), wherein the analog has less than about 10% of the activity of GLP-1 at the GLP-1 receptor.

[0676] With regard to the exemplary embodiments, the analog can be covalently linked to a hydrophilic moiety. In some embodiments, the analog is covalently linked to the hydrophilic moiety at any of amino acid positions 16, 17, 20, 21, 24, 29, 40, or the C-terminus. In certain embodiments, the analog comprises a hydrophilic moiety covalently linked to the analog at position 24.

[0677] In some embodiments, the hydrophilic moiety is covalently linked to a Lys, Cys, Orn, homocysteine, or acetyl-phenylalanine of the analog. The Lys, Cys, Orn, homocysteine, or acetyl-phenylalanine may be an amino acid that is native to SEQ ID NO: 1001, 1227, 1228, 1229 or 1230 or it may be a substituted amino acid. In some embodiments, wherein the hydrophilic moiety is linked to a Cys, the linkage may comprise the structure

[chemical structure]

[0678] With regard to the analogs comprising a hydrophilic moiety, the hydrophilic moiety may be any of those described herein. See, e.g., the teachings under the section “Linkage of hydrophilic moieties.” In some embodiments, the hydrophilic moiety is a polyethylene glycol (PEG). The PEG in certain embodiments has a molecular weight of about 1,000 Daltons to about 40,000 Daltons, e.g., about 20,000 Daltons to about 40,000 Daltons.

[0679] With regard to the exemplary embodiments, the analog can comprise a modified amino acid within the C-terminal extension in which the side chain is covalently linked to an acyl or alkyl group. The acylated or alkylated analog can be in accordance with acylated or alkylated peptides described in the section “Acylation and alkylation.” In some embodiments, the acyl group is a C4 to a C30 fatty acyl group, such as, for example, a C10 fatty acyl or alkyl group, a C12 fatty acyl or alkyl group, a C14 fatty acyl or alkyl group, a C16 fatty acyl or alkyl group, a C18 fatty acyl or alkyl group, a C20 acyl or alkyl group, or a C22 acyl or alkyl group. The acyl or alkyl group may be covalently attached to any amino acid of the analog, including, but not limited to the amino acid at position 10 or 40, or the C-terminal amino acid. In some embodiments, the acyl or alkyl group is covalently linked to the side chain of an amino acid of Formula I, II, or III, e.g., a Lys residue. The acyl or alkyl group is covalently linked to an amino acid which is native to SEQ ID NO: 1001, 1227, 1228, 1229 or 1230 or it may be linked to a substituted amino acid. The acyl or alkyl group is covalently linked to an amino acid which is native to SEQ ID NO: 1095, 1096, 1171 or 1172, or it may be linked to a substituted amino acid.

[0680] In the above exemplary embodiments, wherein the analog comprises an acyl or alkyl group, the analog may be attached to the acyl or alkyl group via a spacer, as described herein. The spacer, for example, may be 3 to 10 atoms in length and may be, for instance, an amino acid (e.g., 6-amino hexanoic acid, any amino acid described herein), a dipeptide (e.g., Ala-Ala, βAla-βAla, Leu-Leu, Pro-Pro, γ-Glu-γ-Glu), a tripeptide, or a hydrophilic or hydrophobic bifunctional spacer. In certain aspects, the total length of the spacer and the acyl or alkyl group is about 14 to about 28 atoms. In some embodiments, the amino acid spacer is not γ-Glu. In some embodiments, the dipeptide spacer is not γ-Glu-γ-Glu.

[0681] In some very specific embodiments, an analog of the invention comprises an amino acid sequence selected from the group consisting of SEQ ID NOs: 1099-1141, 1144-1164, 1166, 1192-1207, 1209-1221 and 1223 or selected from the group consisting of SEQ ID NOs: 1167-1169, 1173-1178 and 1225.

[0682] Further, specific examples of analogs of the invention include but are not limited to, any of those referenced in Tables 1-3.

[0683] In still further exemplary embodiments, the analog of glucagon having GIP agonist activity comprises an acyl or alkyl group (e.g., an acyl or alkyl group which is non-native to a naturally occurring amino acid), wherein the acyl or alkyl group is attached to a spacer, wherein (i) the spacer is attached to the side chain of the amino acid at position 10 of the analog; or (ii) the analog comprises an extension of 1 to 21 amino acids C-terminal to the amino acid at position 29 and the spacer is attached to the side chain of an amino acid corresponding to one of positions 37-43 relative to SEQ ID NO: 1001, wherein the EC₅₀ of the analog for GIP receptor activation is about 10 nM or less.

[0684] In such embodiments, the analog may comprise an amino acid sequence of SEQ ID NO: 1001 with (i) an amino acid modification at position 1 that confers GIP agonist activity, (ii) amino acid modifications at one, two, or all of positions 27, 28, and 29, (iii) at least one of:

[0685] (A) the analog comprises a lactam bridge between the side chains of amino acids at positions i and i+4 or between the side chains of amino acids at positions j and j+3, wherein i is 12, 13, 16, 17, 20 or 24, and wherein j is 17;

[0686] (B) one, two, three, or all of the amino acids at positions 16, 20, 21, and 24 of the analog is substituted with an α,α-disubstituted amino acid; or

[0687] (C) the analog comprises (i) an amino acid substitution of Ser at position 16 with an amino acid of Formula IV:

[chemical structure]

wherein n is 1 to 7, wherein each of R1 and R2 is independently selected from the group consisting of H, C₁-C₁₈ alkyl, (C₁-C₁₈ alkyl)OH, (C₁-C₁₈ alkyl)NH₂, (C₁-C₁₈ alkyl)SH, (C₀-C₄ alkyl)(C₃-C₆)cycloalkyl, (C₀-C₄ alkyl)(C₂-C₅ heterocyclic), (C₀-C₄ alkyl)(C₆-C₁₀ aryl)R₇, and (C₁-C₄ alkyl)(C₃-C₉ heteroaryl), wherein R₇ is H or OH, and the side chain of the amino acid of Formula IV comprises a free amino group; and (ii) an amino acid substitution of the Gln at position 20 with an alpha, alpha-disubstituted amino acid.

[0688] and (iv) up to 6 further amino acid modifications.

[0689] The alpha, alpha-disubstituted amino acid of the analog of these embodiments may be any alpha, alpha-disubstituted amino acid, including, but not limited to, amino iso-butyric acid (Aib), an amino acid disubstituted with the same or a different group selected from methyl, ethyl, propyl, and n-butyl, or with a cyclooctane or cycloheptane (e.g., 1-aminocyclooctane-1-carboxylic acid). In certain embodiments, the alpha, alpha-disubstituted amino acid is Aib.

[0690] The amino acid of Formula IV of the analog of these embodiments may be any amino acid, such as, for example, the amino acid of Formula IV, wherein n is 1, 2, 3, 4, 5, 6, 7, 8, 9, 10, 11, 12, 13, 14, 15, or 16. In certain embodiments, n is 2, 3, 4, or 5, in which case, the amino acid is Dab, Orn, Lys, or homoLys respectively.

[0691] In any of the above exemplary embodiments, the amino acid modification at position 1 that confers GIP agonist activity can be a substitution of His with an amino acid lacking an imidazole side chain. The amino acid modification at position 1 can, for example, be a substitution of His with a large, aromatic amino acid. In some embodiments, the large, aromatic amino acid is any of those described herein, including, for example, Tyr.

[0692] Also, with regard to the above exemplary embodiments, amino acid modifications at one, two, or all of positions 27, 28, and 29 can be any of the modifications at these positions described herein. For example, the Met at position 27 can be substituted with a large aliphatic amino acid, optionally Leu, the Asn at position 28 can be substituted with a small aliphatic amino acid, optionally Ala, and/or the Thr at position 29 can be substituted with a small aliphatic amino acid, optionally Gly. Alternatively, the analog can comprise such amino acid modifications at position 27 and/or 28.

[0693] The analog of the above exemplary embodiments can further comprise 1-9 or 1-6 further, additional amino acid modifications, e.g. 1, 2, 3, 4, 5, 6, 7, 8 or 9 further amino acid modifications, such as, for example, any of the modifications described herein which increase or decrease the activity at any of the GIP, GLP-1, and glucagon receptors, improve solubility, improve duration of action or half-life in circulation, delay the onset of action, or increase stability. The analog can further comprise, for example, an amino acid modification at position 12, optionally, a substitution with Ile, and/or amino acid modifications at positions 17 and 18, optionally substitution with Q at position 17 and A at position 18, and/or an addition of GPSSGAPPPS (SEQ ID NO: 1095) or XGPSSGAPPPS (SEQ ID NO: 1096), or sequences containing one or more conservative substitutions relative to SEQ ID NO: 1095 or 1096, to the C-terminus. The analog can comprise one or more of the following modifications:

[0694] (i) Ser at position 2 substituted with D-Ser, Ala, D-Ala, Gly, N-methyl-Ser, Aib, Val, or α-amino-N-butyric acid;

[0695] (ii) Tyr at position 10 substituted with Trp, Lys, Orn, Glu, Phe, or Val;

[0696] (iii) Linkage of an acyl group to a Lys at position 10;

[0697] (iv) Lys at position 12 substituted with Arg;

[0698] (v) Ser at position 16 substituted with Glu, Gln, homoglutamic acid, homocysteic acid, Thr, Gly, Lys, or Aib;

[0699] (vi) Arg at position 17 substituted with Gln;

[0700] (vii) Arg at position 18 substituted with Ala, Ser, Thr, or Gly;

[0701] (viii) Gln at position 20 substituted with Ala, Ser, Thr, Lys, Citrulline, Arg, Orn, or Aib;

[0702] (ix) Asp at position 21 substituted with Glu, homoglutamic acid, homocysteic acid;

[0703] (x) Val at position 23 substituted with Ile;

[0704] (xi) Gln at position 24 substituted with Asn, Ala, Ser, Thr, or Aib; and

[0705] (xii) a conservative substitution at any of positions 2, 5, 9, 10, 11, 12, 13, 14, 15, 16, 17, 18, 19, 20, 21, 24, 27, 28, and 29.

[0706] The analog in some embodiments comprise a combination of the modifications (i) through (xii). Alternatively or additionally, the analog can comprise an amino acid modification at position 3 (e.g., an amino acid substitution of Gln with Glu), wherein the analog has less than 1% of the activity of glucagon at the glucagon receptor. Alternatively or additionally, the analog can comprise an amino acid modification at position 7 (e.g., an amino acid substitution of Thr with an amino acid lacking a hydroxyl group, e.g., Abu or Ile), a deletion of the amino acid(s) C-terminal to the amino acid at position 27 or 28, yielding a 27- or 28-amino acid peptide, or a combination thereof, wherein the analog has less than about 10% of the activity of GLP-1 at the GLP-1 receptor.

[0707] With regard to the exemplary embodiments, the analog can be covalently linked to a hydrophilic moiety. In some embodiments, the analog is covalently linked to the hydrophilic moiety at any of amino acid positions 16, 17, 20, 21, 24, 29, 40, or the C-terminus. In certain embodiments, the analog comprises a C-terminal extension (e.g., an amino acid sequence of SEQ ID NO: 1095) and an addition of an amino acid comprising the hydrophilic moiety, such that the hydrophilic moiety is covalently linked to the analog at position 40.

[0708] In some embodiments, the hydrophilic moiety is covalently linked to a Lys, Cys, Orn, homocysteine, or acetyl-phenylalanine of the analog. The Lys, Cys, Orn, homocysteine, or acetyl-phenylalanine may be an amino acid that is native to the glucagon sequence (SEQ ID NO: 1001) or it may be an amino acid which is replacing a native amino acid of SEQ ID NO: 1001. In some embodiments, wherein the hydrophilic moiety is attached to a Cys, the linkage to the hydrophilic moiety can comprise the structure

[chemical structure]

[0709] With regard to the analogs comprising a hydrophilic moiety, the hydrophilic moiety may be any of those described herein. See, e.g., the teachings under the section “Linkage of hydrophilic moieties.” In some embodiments, the hydrophilic moiety is a polyethylene glycol (PEG). The PEG in certain embodiments has a molecular weight of about 1,000 Daltons to about 40,000 Daltons, e.g., about 20,000 Daltons to about 40,000 Daltons.

[0710] In the exemplary embodiments, wherein the analog comprises an acyl or alkyl group, which is attached to the analog via a spacer, the spacer can be any spacer as described herein. The spacer, for example, may be 3 to 10 atoms in length and may be, for instance, an amino acid (e.g., 6-amino hexanoic acid, any amino acid described herein), a dipeptide (e.g., Ala-Ala, βAla-βAla, Leu-Leu, Pro-Pro, γ-Glu-γ-Glu), a tripeptide, or a hydrophilic or hydrophobic bifunctional spacer. In certain aspects, the total length of the spacer and the acyl or alkyl group is about 14 to about 28 atoms. In some embodiments, the amino acid spacer is not γ-Glu. In some embodiments, the dipeptide spacer is not γ-Glu-γ-Glu.

[0711] The acyl or alkyl group is any acyl or alkyl group as described herein, such as an acyl or alkyl group which is non-native to a naturally occurring amino acid. The acyl or alkyl group in some embodiments is a C4 to C30 fatty acyl group, such as, for example, a C10 fatty acyl or alkyl group, a C12 fatty acyl or alkyl group, a C14 fatty acyl or alkyl group, a C16 fatty acyl or alkyl group, a C18 fatty acyl or alkyl group, a C20 acyl or alkyl group, or a C22 acyl or alkyl group, or a C4 to C30 alkyl group. In specific embodiments, the acyl group is a C12 to C18 fatty acyl group (e.g., a C14 or C16 fatty acyl group).

[0712] In some embodiments, the extension of about 1 to about 21 amino acids C-terminal to the amino acid at position 29 of the analog comprises the amino acid sequence of GPSSGAPPPS (SEQ ID NO: 1095) or XGPSSGAPPPS (SEQ ID NO: 1096), wherein X is any amino acid, or GPSSGAPPPK (SEQ ID NO: 1170) or XGPSSGAPPPK (SEQ ID NO: 1171) or XGPSSGAPPPSK (SEQ ID NO: 1172), wherein X is Gly or a small, aliphatic or non-polar or slightly polar amino acid. In some embodiments, the about 1 to about 21 amino acids may comprise sequences containing one or more conservative substitutions relative to SEQ ID NO: 1095, 1096, 1170, 1171 or 1172. In some embodiments, the acylated or alkylated amino acid is located at position 37, 38, 39, 40, 41, 42, or 43 of the C-terminally-extended analog. In certain embodiments, the acylated or alkylated amino acid is located at position 40 of the C-terminally extended analog.

[0713] The GIP agonist may be a peptide comprising the amino acid sequence of any of the amino acid sequences, e.g., SEQ ID NOs: 1005-1094, optionally with up to 1, 2, 3, 4, or 5 further modifications that retain GIP agonist activity. In certain embodiments, the GIP agonist comprises the amino acids of any of SEQ ID NOs: 1099-1275.

### Class 3 Glucagon Related Peptides

[0714] In certain embodiments, the glucagon related peptide is a Class 3 glucagon related peptide, which is described herein and in International Patent Application Publication Nos. WO 2009/155258, WO 2008/101017, and U.S. Provisional Application No. 61/288,248 (filed on Dec. 18, 2009) the contents of which are incorporated by reference in their entirety.

[0715] Some of the biological sequences referenced in the following section (SEQ ID NOs: 1-656) relating to Class 3 glucagon related peptides are correspond to SEQ ID NOs: 1-656 in International Patent Application Publication No. WO 2009/155258.

### Activity

[0716] The Class 3 glucagon related peptide can be a peptide that exhibits increased activity at the glucagon receptor, and in further embodiments exhibits enhanced biophysical stability and/or aqueous solubility. In addition, in some embodiments, the Class 3 glucagon related peptide has lost native glucagon's selectivity for the glucagon receptor verses the GLP-1 receptor, and thus represents co-agonists of those two receptors. Selected amino acid modifications within the Class 3 glucagon related peptide can control the relative activity of the peptide at the GLP-1 receptor verses the glucagon receptor. Thus, the Class 3 glucagon related peptide can be a glucagon/GLP-1 co-agonist that has higher activity at the glucagon receptor versus the GLP-1 receptor, a glucagon/GLP-1 co-agonist that has approximately equivalent activity at both receptors, or a glucagon/GLP-1 co-agonist that has higher activity at the GLP-1 receptor versus the glucagon receptor. The latter category of co-agonist can be engineered to exhibit little or no activity at the glucagon receptor, and yet retain ability to activate the GLP-1 receptor with the same or better potency than native GLP-1. Any of these co-agonists may also include modifications that confer enhanced biophysical stability and/or aqueous solubility.

[0717] Modifications of the Class 3 glucagon related peptide can be made to produce a glucagon peptide having anywhere from at least about 1% (including at least about 1.5%, 2%, 5%, 7%, 10%, 20%, 30%, 40%, 50%, 60%, 75%, 100%, 125%, 150%, 175%) to about 200% or higher activity at the GLP-1 receptor relative to native GLP-1 and anywhere from at least about 1% (including about 1.5%, 2%, 5%, 7%, 10%, 20%, 30%, 40%, 50%, 60%, 75%, 100%, 125%, 150%, 175%, 200%, 250%, 300%, 350%, 400%, 450%) to about 500% or higher activity at the glucagon receptor relative to native glucagon. The amino acid sequence of native glucagon is SEQ ID NO: 1, the amino acid sequence of GLP-1(7-36)amide is SEQ ID NO: 52, and the amino acid sequence of GLP-1(7-37)acid is SEQ ID NO: 50. In exemplary embodiments, a Class 3 glucagon related peptide may exhibit at least 10% of the activity of native glucagon at the glucagon receptor and at least 50% of the activity of native GLP-1 at the GLP-1 receptor, or at least 40% of the activity of native glucagon at the glucagon receptor and at least 40% of the activity of native GLP-1 at the GLP-1 receptor, or at least 60% of the activity of native glucagon at the glucagon receptor and at least 60% of the activity of native GLP-1 at the GLP-1 receptor.

[0718] Selectivity of a Class 3 glucagon related peptide for the glucagon receptor versus the GLP-1 receptor can be described as the relative ratio of glucagon/GLP-1 activity (the peptide's activity at the glucagon receptor relative to native glucagon, divided by the peptide's activity at the GLP-1 receptor relative to native GLP-1). For example, a Class 3 glucagon related peptide that exhibits 60% of the activity of native glucagon at the glucagon receptor and 60% of the activity of native GLP-1 at the GLP-1 receptor has a 1:1 ratio of glucagon/GLP-1 activity. Exemplary ratios of glucagon/GLP-1 activity include about 1:1, 1.5:1, 2:1, 3:1, 4:1, 5:1, 6:1, 7:1, 8:1, 9:1 or 10:1, or about 1:10, 1:9, 1:8, 1:7, 1:6, 1:5, 1:4, 1:3, 1:2, or 1:1.5. As an example, a glucagon/GLP-1 activity ratio of 10:1 indicates a 10-fold selectivity for the glucagon receptor versus the GLP-1 receptor. Similarly, a GLP-1/glucagon activity ratio of 10:1 indicates a 10-fold selectivity for the GLP-1 receptor versus the glucagon receptor.

[0719] In some embodiments, the Class 3 glucagon related peptides have about 10% or less of the activity of native glucagon at the glucagon receptor, e.g. about 1-10%, or about 0.1-10%, or greater than about 0.1% but less than about 10%, while exhibiting at least 20% of the activity of GLP-1 at the GLP-1 receptor. For example, exemplary Class 3 glucagon related peptides described herein have about 0.5%, about 1% or about 7% of the activity of native glucagon, while exhibiting at least 20% of the activity of GLP-1 at the GLP-1 receptor.

[0720] The Class 3 glucagon related peptide can be a glucagon peptide with increased or decreased activity at the glucagon receptor, or GLP-1 receptor, or both. The Class 3 glucagon related peptide can be a glucagon peptide with altered selectivity for the glucagon receptor versus the GLP-1 receptor.

[0721] Thus, as disclosed herein high potency Class 3 glucagon related peptides are provided that also exhibit improved solubility and/or stability. An exemplary high potency Class 3 glucagon related peptide exhibits at least about 200% of the activity of native glucagon at the glucagon receptor, and optionally is soluble at a concentration of at least 1 mg/mL at a pH between 6 and 8, or between 6 and 9, or between 7 and 9 (e.g. pH 7), and optionally retains at least 95% of the original peptide (e.g. 5% or less of the original peptide is degraded or cleaved) after 24 hours at 25° C. As another example, an exemplary Class 3 glucagon related peptide exhibits greater than about 40% or greater than about 60% activity at both the glucagon and the GLP-1 receptors (at a ratio between about 1:3 and 3:1, or between about 1:2 and 2:1), is optionally soluble at a concentration of at least 1 mg/mL at a pH between 6 and 8 or between 6 and 9, or between 7 and 9 (e.g. pH 7), and optionally retains at least 95% of the original peptide after 24 hours at 25° C. Another exemplary Class 3 glucagon related peptide exhibits about 175% or more of the activity of native glucagon at the glucagon receptor and about 20% or less of the activity of native GLP-1 at the GLP-1 receptor, is optionally soluble at a concentration of at least 1 mg/mL at a pH between 6 and 8 or between 6 and 9, or between 7 and 9 (e.g. pH 7), and optionally retains at least 95% of the original peptide after 24 hours at 25° C. Yet another exemplary Class 3 glucagon related peptide exhibits about 10% or less of the activity of native glucagon at the glucagon receptor and at least about 20% of the activity of native GLP-1 at the GLP-1 receptor, is optionally soluble at a concentration of at least 1 mg/mL at a pH between 6 and 8 or between 6 and 9, or between 7 and 9 (e.g. pH 7), and optionally retains at least 95% of the original peptide after 24 hours at 25° C. Yet another exemplary Class 3 glucagon related peptide exhibits about 10% or less but above 0.1%, 0.5% or 1% of the activity of native glucagon at the glucagon receptor and at least about 50%, 60%, 70%, 80%, 90% or 100% or more of the activity of native GLP-1 at the GLP-1 receptor, is optionally soluble at a concentration of at least 1 mg/mL at a pH between 6 and 8 or between 6 and 9, or between 7 and 9 (e.g. pH 7), and optionally retains at least 95% of the original peptide after 24 hours at 25° C. In some embodiments, such Class 3 glucagon related peptides retain at least 22, 23, 24, 25, 26, 27 or 28 of the naturally occurring amino acids at the corresponding positions in native glucagon (e.g. have 1-7, 1-5 or 1-3 modifications relative to naturally occurring glucagon).

### Modifications Affecting Glucagon Activity

[0722] Increased activity at the glucagon receptor is provided by an amino acid modification at position 16 of native glucagon (SEQ ID NO: 1). In some embodiments, the Class 3 glucagon related peptide is a glucagon agonist that has been modified relative to the wild type peptide of His-Ser-Gln-Gly-Thr-Phe-Thr-Ser-Asp-Tyr-Ser-Lys-Tyr-Leu-Asp-Ser-Arg-Arg-Ala-Gln-Asp-Phe-Val-Gln-Trp-Leu-Met-Asn-Thr (SEQ ID NO: 1) to enhance the peptide's potency at the glucagon receptor. The normally occurring serine at position 16 of native glucagon (SEQ ID NO: 1) can be substituted with select acidic amino acids to enhance the potency of glucagon, in terms of its ability to stimulate cAMP synthesis in a validated in vitro model assay (see Example 2). More particularly, this substitution enhances the potency of the analog at least 2-fold, 4-fold, 5-fold, and up to 10-fold greater at the glucagon receptor. This substitution also enhances the analog's activity at the GLP-1 receptor at least 5-fold, 10-fold, or 15-fold relative to native glucagon, but selectivity is maintained for the glucagon receptor over the GLP-1 receptor.

[0723] By way of nonlimiting example, such enhanced potency can be provided by substituting the naturally occurring serine at position 16 with glutamic acid or with another negatively charged amino acid having a side chain with a length of 4 atoms, or alternatively with any one of glutamine, homoglutamic acid, or homocysteic acid, or a charged amino acid having a side chain containing at least one heteroatom, (e.g. N, O, S, P) and with a side chain length of about 4 (or 3-5) atoms. In accordance with some embodiments, the serine residue at position 16 of native glucagon is substituted with an amino acid selected from the group consisting of glutamic acid, glutamine, homoglutamic acid, homocysteic acid, threonine, or glycine. In accordance with some embodiments, the serine residue at position 16 of native glucagon is substituted with an amino acid selected from the group consisting of glutamic acid, glutamine, homoglutamic acid and homocysteic acid, and in some embodiments the serine residue is substituted with glutamic acid.

[0724] In some embodiments, the enhanced potency Class 3 glucagon related peptide comprises a peptide of SEQ ID NO: 2, SEQ ID NO: 3, SEQ ID NO: 4, SEQ ID NO: 5, SEQ ID NO: 6, SEQ ID NO: 7 or a glucagon agonist analog of SEQ ID NO: 5. In accordance with some embodiments, a Class 3 glucagon related peptide having enhanced potency at the glucagon receptor relative to wild type glucagon is provided wherein the peptide comprises the sequence of SEQ ID NO: 7, SEQ ID NO: 8, SEQ ID NO: 9 or SEQ ID NO: 10, wherein the glucagon peptide retains its selectivity for the glucagon receptor relative to the GLP-1 receptors. In some embodiments, the Class 3 glucagon related peptide having enhanced specificity for the glucagon receptor comprises the peptide of SEQ ID NO: 8, SEQ ID NO: 9, SEQ ID NO: 10 or a glucagon agonist analog thereof, wherein the carboxy terminal amino acid retains its native carboxylic acid group. In accordance with some embodiments, a Class 3 glucagon related peptide comprises the sequence of NH₂-His-Ser-Gln-Gly-Thr-Phe-Thr-Ser-Asp-Tyr-Ser-Lys-Tyr-Leu-Asp-Glu-Arg-Arg-Ala-Gln-Asp-Phe-Val-Gln-Trp-Leu-Met-Asn-Thr-COOH (SEQ ID NO: 10), wherein the peptide exhibits approximately fivefold enhanced potency at the glucagon receptor, relative to native glucagon as measured by the in vitro cAMP assay of Example 2.

[0725] Glucagon receptor activity can be reduced, maintained, or enhanced by an amino acid modification at position 3, e.g. substitution of the naturally occurring glutamine at position 3. In some embodiments, substitution of the amino acid at position 3 with an acidic, basic, or hydrophobic amino acid (glutamic acid, ornithine, norleucine) has been shown to substantially reduce or destroy glucagon receptor activity. The analogs that are substituted with, for example, glutamic acid, ornithine, or norleucine have about 10% or less of the activity of native glucagon at the glucagon receptor, e.g. about 1-10%, or about 0.1-10%, or greater than about 0.1% but less than about 10%, while exhibiting at least 20% of the activity of GLP-1 at the GLP-1 receptor. For example, exemplary analogs described herein have about 0.5%, about 1% or about 7% of the activity of native glucagon, while exhibiting at least 20% of the activity of GLP-1 at the GLP-1 receptor. In particular, any of the Class 3 glucagon related peptides, including glucagon analogs, glucagon agonist analogs, glucagon co-agonists, and glucagon/GLP-1 co-agonist molecules, described herein may be modified to contain a modification at position 3, e.g., Gln substituted with Glu, to produce a peptide with high selectivity, e.g., tenfold selectivity, for the GLP-1 receptor as compared to the selectivity for the glucagon receptor.

[0726] In another embodiment, the naturally occurring glutamine at position 3 of any of the Class 3 glucagon peptides can be substituted with a glutamine analog without a substantial loss of activity at the glucagon receptor, and in some cases, with an enhancement of glucagon receptor activity, as described herein. In specific embodiments, the amino acid at position 3 is substituted with Dab(Ac). For example, glucagon agonists can comprise the amino acid sequence of SEQ ID NO: 595, SEQ ID NO: 601 SEQ ID NO: 603, SEQ ID NO: 604, SEQ ID NO: 605, and SEQ ID NO: 606.

[0727] It was observed that modifications at position 2 (e.g. Aib at position 2) and in some cases modifications at position 1 may reduce glucagon activity. This reduction in glucagon activity can be restored by stabilizing the alpha-helix in the C-terminal portion of glucagon, e.g. through means described herein, for example, through a covalent bond between the side chains of the amino acids at positions “i” and “i+4”, e.g., 12 and 16, 16 and 20, or 20 and 24. In some embodiments, this covalent bond is a lactam bridge between a glutamic acid at position 16 and a lysine at position 20. In some embodiments, this covalent bond is an intramolecular bridge other than a lactam bridge. For example, suitable covalent bonding methods include any one or more of olefin metathesis, lanthionine-based cyclization, disulfide bridge or modified sulfur-containing bridge formation, the use of α, ω-diaminoalkane tethers, the formation of metal-atom bridges, and other means of peptide cyclization.

### Modifications Affecting GLP-1 Activity

[0728] Enhanced activity at the GLP-1 receptor is provided by replacing the carboxylic acid of the C-terminal amino acid with a charge-neutral group, such as an amide or ester. In some embodiments, these Class 3 glucagon related peptides comprise a sequence of SEQ ID NO: 20, wherein the carboxy terminal amino acid has an amide group in place of the carboxylic acid group found on the native amino acid. These Class 3 glucagon related peptides have strong activity at both the glucagon and GLP-1 receptors and thus act as co-agonists at both receptors. In accordance with some embodiments, the Class 3 glucagon related peptide is a glucagon and GLP-1 receptor co-agonist, wherein the peptide comprises the sequence of SEQ ID NO: 20, wherein the amino acid at position 28 is Asn or Lys and the amino acid at position 29 is Thr-amide

[0729] Increased activity at the GLP-1 receptor is provided by modifications that stabilize the alpha helix in the C-terminal portion of glucagon (e.g. around residues 12-29).

[0730] In some embodiments, such modifications permit formation of an intramolecular bridge between the side chains of two amino acids that are separated by three intervening amino acids (i.e., an amino acid at position “i” and an amino acid at position “i+4”, wherein i is any integer between 12 and 25), by two intervening amino acids, i.e., an amino acid at position “j” and an amino acid at position “j+3,” wherein j is any integer between 12 and 27, or by six intervening amino acids, i.e., an amino acid at position “k” and an amino acid at position “k+7,” wherein k is any integer between 12 and 22. In exemplary embodiments, the bridge or linker is about 8 (or about 7-9) atoms in length and forms between side chains of amino acids at positions 12 and 16, or at positions 16 and 20, or at positions 20 and 24, or at positions 24 and 28. The two amino acid side chains can be linked to one another through non-covalent bonds, e.g., hydrogen-bonding, ionic interactions, such as the formation of salt bridges, or by covalent bonds.

[0731] In accordance with some embodiments, the Class 3 glucagon related peptide exhibits glucagon/GLP-1 receptor co-agonist activity and comprises an amino acid sequence selected from the group consisting of SEQ ID NO: 11, 47, 48 and 49. In some embodiments, the side chains are covalently bound to one another, and in some embodiments the two amino acids are bound to one another to form a lactam ring.

[0732] In accordance with some embodiments, the Class 3 glucagon related peptide comprises SEQ ID NO: 45, wherein at least one lactam ring is formed between the side chains of an amino acid pair selected from the group consisting of amino acid pairs 12 and 16, 16 and 20, and 24 or 24 and 28. In some embodiments, the Class 3 glucagon related peptide comprises a glucagon peptide analog of SEQ ID NO: 20, wherein the peptide comprises an intramolecular lactam bridge formed between amino acid positions 12 and 16 or between amino acid positions 16 and 20. In some embodiments, the Class 3 glucagon related peptide comprises the sequence of SEQ ID NO: 20, wherein an intramolecular lactam bridge is formed between amino acid positions 12 and 16, between amino acid positions 16 and 20, or between amino acid positions 20 and 24 and the amino acid at position 29 is glycine, wherein the sequence of SEQ ID NO: 29 is linked to the C-terminal amino acid of SEQ ID NO: 20. In a further embodiment, the amino acid at position 28 is aspartic acid.

[0733] In some specific embodiments, stabilization of the alpha helix structure in the C-terminal portion of the Class 3 glucagon related peptide is achieved through the formation of an intramolecular bridge other than a lactam bridge. For example, suitable covalent bonding methods include any one or more of olefin metathesis, lanthionine-based cyclization, disulfide bridge or modified sulfur-containing bridge formation, the use of α, ω-diaminoalkane tethers, the formation of metal-atom bridges, and other means of peptide cyclization are used to stabilize the alpha helix.

[0734] Furthermore, enhanced activity at the GLP-1 receptor may be achieved by stabilizing the alpha-helix structure in the C-terminal portion of the glucagon peptide (around amino acids 12-29) through purposeful introduction of one or more α, α-disubstituted amino acids at positions that retain the desired activity. Such peptides may be considered herein as a peptide lacking an intramolecular bridge. In some aspects, stabilization of the alpha-helix is accomplished in this manner without introduction of an intramolecular bridge such as a salt bridge or covalent bond. In some embodiments, one, two, three, four or more of positions 16, 17, 18, 19, 20, 21, 24 or 29 of a glucagon peptide is substituted with an α, α-disubstituted amino acid. For example, substitution of position 16 of the Class 3 glucagon related peptide with amino iso-butyric acid (Aib) enhances GLP-1 activity, in the absence of a salt bridge or lactam. In some embodiments, one, two, three or more of positions 16, 20, 21 or 24 are substituted with Aib.

[0735] Enhanced activity at the GLP-1 receptor may be achieved by an amino acid modification at position 20. In some embodiments, the glutamine at position 20 is replaced with another hydrophilic amino acid having a side chain that is either charged or has an ability to hydrogen-bond, and is at least about 5 (or about 4-6) atoms in length, for example, lysine, citrulline, arginine, or ornithine.

[0736] Increased activity at the GLP-1 receptor is demonstrated in Class 3 glucagon related peptides comprising the C-terminal extension of SEQ ID NO: 26. GLP-1 activity in such Class 3 glucagon related peptides comprising SEQ ID NO: 26 can be further increased by modifying the amino acid at position 18, 28 or 29, or at position 18 and 29, as described herein.

[0737] A further modest increase in GLP-1 potency may be achieved by modifying the amino acid at position 10 to be Trp.

[0738] Combinations of the modifications that increase GLP-1 receptor activity may provide higher GLP-1 activity than any of such modifications taken alone. For example, the Class 3 glucagon related peptides can comprise modifications at position 16, at position 20, and at the C-terminal carboxylic acid group, optionally with a covalent bond between the amino acids at positions 16 and 20; can comprise modifications at position 16 and at the C-terminal carboxylic acid group; can comprise modifications at positions 16 and 20, optionally with a covalent bond between the amino acids at positions 16 and 20; or can comprise modifications at position 20 and at the C-terminal carboxylic acid group; optionally with the proviso that the amino acid at position 12 is not Arg; or optionally with the proviso that the amino acid at position 9 is not Glu.

### Modifications Affecting Solubility

[0739] Addition of Hydrophilic Moieties

[0740] The Class 3 glucagon related peptides can be further modified to improve the peptide's solubility and stability in aqueous solutions at physiological pH, while retaining the high biological activity relative to native glucagon. Hydrophilic moieties as discussed herein can be attached to the Class 3 glucagon related peptide as further discussed herein.

[0741] In accordance with some embodiments, introduction of hydrophilic groups at positions 17, 21, and 24 of the Class 3 glucagon related peptide comprising SEQ ID NO: 9 or SEQ ID NO: 10 are anticipated to improve the solubility and stability of the high potency glucagon analog in solutions having a physiological pH. Introduction of such groups also increases duration of action, e.g. as measured by a prolonged half-life in circulation.

[0742] In some embodiments, the Class 3 glucagon related peptide comprises a sequence selected from the group consisting of SEQ ID NO: 11, SEQ ID NO: 12, SEQ ID NO: 13, SEQ ID NO: 14, SEQ ID NO: 15, SEQ ID NO: 16, SEQ ID NO: 17, SEQ ID NO: 18 and SEQ ID NO: 19, wherein the side chain of an amino acid residue at one of position 16, 17, 21 or 24 of said Class 3 glucagon related peptide further comprises a polyethylene glycol chain, having a molecular weight selected from the range of about 500 to about 40,000 Daltons. In some embodiments, the polyethylene glycol chain has a molecular weight selected from the range of about 500 to about 5,000 Daltons. In another embodiment, the polyethylene glycol chain has a molecular weight of about 10,000 to about 20,000 Daltons. In yet other exemplary embodiments the polyethylene glycol chain has a molecular weight of about 20,000 to about 40,000 Daltons.

[0743] Suitable hydrophilic moieties include any water soluble polymers known in the art, including the hydrophilic moieties described herein, homo- or co-polymers of PEG, and a monomethyl-substituted polymer of PEG (mPEG). In accordance with some embodiments the hydrophilic group comprises a polyethylene (PEG) chain. More particularly, in some embodiments, the Class 3 glucagon related peptide comprises the sequence of SEQ ID NO: 6 or SEQ ID NO: 7 wherein a PEG chain is covalently linked to the side chains of amino acids present at positions 21 and 24 of the Class 3 glucagon related peptide and the carboxy terminal amino acid of the Class 3 glucagon related peptide has the carboxylic acid group. In accordance with some embodiments, the polyethylene glycol chain has an average molecular weight selected from the range of about 500 to about 10,000 Daltons.

[0744] In accordance with some embodiments, the pegylated Class 3 glucagon related peptide comprises two or more polyethylene glycol chains covalently bound to the Class 3 glucagon related peptide wherein the total molecular weight of the glucagon chains is about 1,000 to about 5,000 Daltons. In some embodiments the pegylated glucagon agonist comprises a peptide consisting of SEQ ID NO: 5 or a glucagon agonist analog of SEQ ID NO: 5, wherein a PEG chain is covalently linked to the amino acid residue at position 21 and at position 24, and wherein the combined molecular weight of the two PEG chains is about 1,000 to about 5,000 Daltons.

[0745] Charged C-Terminus

[0746] The solubility of the Class 3 glucagon related peptide comprising SEQ ID NO: 20 can be further improved, for example, by introducing one, two, three or more charged amino acid(s) to the C-terminal portion of glucagon peptide of SEQ ID NO: 20, preferably at a position C-terminal to position 27. Such a charged amino acid can be introduced by substituting a native amino acid with a charged amino acid, e.g. at positions 28 or 29, or alternatively by adding a charged amino acid, e.g. after position 27, 28 or 29. In exemplary embodiments, one, two, three or all of the charged amino acids are negatively charged. Additional modifications, e.g. conservative substitutions, may be made to the Class 3 glucagon related peptide that still allow it to retain glucagon activity. In some embodiments, an analog of the Class 3 glucagon related peptide of SEQ ID NO: 20 is provided wherein the analog differs from SEQ ID NO: 20 by 1 to 2 amino acid substitutions at positions 17-26, and, in some embodiments, the analog differs from the peptide of SEQ ID NO: 20 by an amino acid substitution at position 20.

### Acylation/Alkylation

[0747] In accordance with some embodiments, the glucagon peptide is modified to comprise an acyl or alkyl group, e.g., a C4 to C30 acyl or alkyl group. In some aspects, the acyl group or alkyl group is not naturally occurring on an amino acid. In specific aspects, the acyl or alkyl group is non-native to any naturally-occurring amino acid. Acylation or alkylation can increase the half-life in circulation and/or delay the onset of and/or extend the duration of action and/or improve resistance to proteases such as DPP-IV. The activity at the glucagon receptor and GLP-1 receptor of the Class 3 glucagon related peptides is maintained, if not substantially enhanced after acylation Further, the potency of the acylated analogs were comparable to the unacylated versions of the Class 3 glucagon related peptides, if not substantially enhanced.

[0748] In some embodiments, the invention provides a Class 3 glucagon related peptide modified to comprise an acyl group or alkyl group covalently linked to the amino acid at position 10 of the glucagon peptide. The glucagon peptide may further comprise a spacer between the amino acid at position 10 of the Class 3 glucagon related peptide and the acyl group or alkyl group. Any of the foregoing Class 3 glucagon related peptides may comprise two acyl groups or two alkyl groups, or a combination thereof.

[0749] In a specific aspect of the invention, the acylated Class 3 glucagon related peptide comprises the amino acid sequence of any of SEQ ID NOs: 534-544 and 546-549.

### C-Terminal Truncation

[0750] In some embodiments, the Class 3 glucagon related peptides described herein are further modified by truncation or deletion of one or two amino acids of the C-terminus of the glucagon peptide (i.e., position 29 and/or 28) without affecting activity and/or potency at the glucagon and GLP-1 receptors. In this regard, the Class 3 glucagon related peptide can comprise amino acids 1-27 or 1-28 of the native glucagon peptide (SEQ ID NO: 1), optionally with one or more modifications described herein.

[0751] In some embodiments, the truncated Class 3 glucagon related peptide comprises SEQ ID NO: 550 or SEQ ID NO: 551. In another embodiment, the truncated glucagon agonist peptide comprises SEQ ID NO: 552 or SEQ ID NO: 553.

### C-Terminal Extension

[0752] In accordance with some embodiments, the Class 3 glucagon related peptides disclosed herein are modified by the addition of a second peptide to the carboxy terminus of the glucagon peptide, for example, SEQ ID NO: 26, SEQ ID NO: 27 or SEQ ID NO: 28. In some embodiments, a Class 3 glucagon related peptide having a sequence selected from the group consisting of SEQ ID NO: 11, SEQ ID NO: 12, SEQ ID NO: 13, SEQ ID NO: 14, SEQ ID NO: 15, SEQ ID NO: 16, SEQ ID NO: 17, SEQ ID NO: 18, SEQ ID NO: 19, SEQ ID NO: 66, SEQ ID NO: 67, SEQ ID NO: 68, and SEQ ID NO: 69 is covalently bound through a peptide bond to a second peptide, wherein the second peptide comprises a sequence selected from the group consisting of SEQ ID NO: 26, SEQ ID NO: 27 and SEQ ID NO: 28. In a further embodiment, in Class 3 glucagon related peptides which comprise the C-terminal extension, the threonine at position 29 of the native glucagon peptide is replaced with a glycine. A Class 3 glucagon related peptide having a glycine substitution for threonine at position 29 and comprising the carboxy terminal extension of SEQ ID NO: 26 is four times as potent at the GLP-1 receptor as native glucagon modified to comprise the carboxy terminal extension of SEQ ID NO: 26. Potency at the GLP-1 receptor can be further enhanced by an alanine substitution for the native arginine at position 18.

[0753] Accordingly, the Class 3 glucagon related peptide can have a carboxy terminal extension of SEQ ID NO: 27 (KRNRNNIA) or SEQ ID NO: 28. In accordance with some embodiments, Class 3 glucagon related peptide comprising SEQ ID NO: 33 or SEQ ID NO: 20, further comprises the amino acid sequence of SEQ ID NO: 27 (KRNRNNIA) or SEQ ID NO: 28 linked to amino acid 29 of the glucagon peptide. More particularly, the Class 3 glucagon related peptide comprises a sequence selected from the group consisting of SEQ ID NO: 10, SEQ ID NO: 12, SEQ ID NO: 13 SEQ ID NO: 14 and SEQ ID NO: 15, further comprising the amino acid sequence of SEQ ID NO: 27 (KRNRNNIA) or SEQ ID NO: 28 linked to amino acid 29 of the glucagon peptide. More particularly, the glucagon peptide comprises a sequence selected from the group consisting of SEQ ID NO: 10, SEQ ID NO: 12, SEQ ID NO: 13 SEQ ID NO: 14, SEQ ID NO: 15, SEQ ID NO: 16, SEQ ID NO: 17, SEQ ID NO: 18, SEQ ID NO: 66, SEQ ID NO: 67, SEQ ID NO: 68, SEQ ID NO: 69, SEQ ID NO: 55 and SEQ ID NO: 56 further comprising the amino acid sequence of SEQ ID NO: 26 (GPSSGAPPPS) or SEQ ID NO: 29 linked to amino acid 29 of the Class 3 glucagon related peptide. In some embodiments, the Class 3 glucagon related peptide comprises the sequence of SEQ ID NO: 64.

### Other Modifications

[0754] Any of the modifications described above with regard to Class 3 glucagon related peptides which increase or decrease glucagon receptor activity and which increase GLP-1 receptor activity can be applied individually or in combination. Combinations of the modifications that increase GLP-1 receptor activity generally provide higher GLP-1 activity than any of such modifications taken alone. Any of the modifications described above can also be combined with other modifications described herein in reference to Class 3 glucagon related peptides that confer other desirable properties, such as increased solubility and/or stability and/or duration of action. Alternatively, any of the modifications described above can be combined with other modifications described herein in reference to Class 3 glucagon related peptides that do not substantially affect solubility or stability or activity. Exemplary modifications include but are not limited to:

[0755] (A) Improving solubility, for example, by introducing one, two, three or more charged amino acid(s) to the C-terminal portion of native glucagon, preferably at a position C-terminal to position 27. Such a charged amino acid can be introduced by substituting a native amino acid with a charged amino acid, e.g. at positions 28 or 29, or alternatively by adding a charged amino acid, e.g. after position 27, 28 or 29. In exemplary embodiments, one, two, three or all of the charged amino acids are negatively charged. In other embodiments, one, two, three or all of the charged amino acids are positively charged. Such modifications increase solubility, e.g. provide at least 2-fold, 5-fold, 10-fold, 15-fold, 25-fold, 30-fold or greater solubility relative to native glucagon at a given pH between about 5.5 and 8, e.g., pH 7, when measured after 24 hours at 25° C.

[0756] (B) Increasing solubility and duration of action or half-life in circulation by addition of a hydrophilic moiety such as a polyethylene glycol chain, as described herein, e.g. at position 16, 17, 20, 21, 24 or 29, or at the C-terminal amino acid of the peptide.

[0757] (C) Increasing stability by modification of the aspartic acid at position 15, for example, by deletion or substitution with glutamic acid, homoglutamic acid, cysteic acid or homocysteic acid. Such modifications can reduce degradation or cleavage at a pH within the range of 5.5 to 8, especially in acidic or alkaline buffers, for example, retaining at least 75%, 80%, 90%, 95%, 96%, 97%, 98% or 99% of the original peptide after 24 hours at 25° C.

[0758] (D) Increasing stability by modification of the methionine at position 27, for example, by substitution with leucine or norleucine. Such modifications can reduce oxidative degradation. Stability can also be increased by modification of the Gln at position 20 or 24, e.g. by substitution with Ser, Thr, Ala or Aib. Such modifications can reduce degradation that occurs through deamidation of Gln. Stability can be increased by modification of Asp at position 21, e.g. by substitution with Glu. Such modifications can reduce degradation that occurs through dehydration of Asp to form a cyclic succinimide intermediate followed by isomerization to iso-aspartate.

[0759] (E) Increasing resistance to dipeptidyl peptidase IV (DPP IV) cleavage by modification of the amino acid at position 1 or 2 with the DPP-IV resistant amino acids described herein and including modification of the amino acid at position 2 with N-methyl-alanine.

[0760] (F) Conservative or non-conservative substitutions, additions or deletions that do not affect activity, for example, conservative substitutions at one or more of positions 2, 5, 7, 10, 11, 12, 13, 14, 16, 17, 18, 19, 20, 21, 24, 27, 28 or 29; deletions at one or more of positions 27, 28 or 29; or a deletion of amino acid 29 optionally combined with a C-terminal amide or ester in place of the C-terminal carboxylic acid group;

[0761] (G) Adding C-terminal extensions as described herein;

[0762] (H) Increasing half-life in circulation and/or extending the duration of action and/or delaying the onset of action, for example, through acylation or alkylation of the glucagon peptide, as described herein;

[0763] (I) Homodimerization or heterodimerization as described herein.

[0764] Other modifications include substitution of His at position 1 with a large, aromatic amino acid (e.g., Tyr, Phe, Trp or amino-Phe); Ser at position 2 with Ala; substitution of Tyr at position 10 with Val or Phe; substitution of Lys at position 12 with Arg; substitution of Asp at position 15 with Glu; substitution of Ser at position 16 with Thr or Aib.

[0765] Class 3 glucagon related peptides with GLP-1 activity that contain a non-conservative substitution of His at position 1 with a large, aromatic amino acid (e.g., Tyr) can retain GLP-1 activity provided that the alpha-helix is stabilized via an intramolecular bridge, e.g., such as any of those described herein.

### Conjugates and Fusions

[0766] The Class 3 glucagon related peptide can be linked, optionally via covalent bonding and optionally via a linker, to a conjugate moiety.

[0767] The Class 3 glucagon related peptide also can be part of a fusion peptide or protein wherein a second peptide or polypeptide has been fused to a terminus, e.g., the carboxy terminus of the Class 3 glucagon related peptide.

[0768] More particularly, the fusion Class 3 glucagon related peptide may comprise a glucagon agonist of SEQ ID NO: 55, SEQ ID NO: 9 or SEQ ID NO: 10 further comprising an amino acid sequence of SEQ ID NO: 26 (GPSSGAPPPS), SEQ ID NO: 27 (KRNRNNIA) or SEQ ID NO: 28 (KRNR) linked to amino acid 29 of the glucagon peptide. In some embodiments, the amino acid sequence of SEQ ID NO: 26 (GPSSGAPPPS), SEQ ID NO: 27 (KRNRNNIA) or SEQ ID NO: 28 (KRNR) is bound to amino acid 29 of the Class 3 glucagon related peptide through a peptide bond. Applicants have discovered that in Class 3 glucagon related peptide fusion peptides comprising the C-terminal extension peptide of Exendin-4 (e.g., SEQ ID NO: 26 or SEQ ID NO: 29), substitution of the native threonine residue at position 29 with glycine dramatically increases GLP-1 receptor activity. This amino acid substitution can be used in conjunction with other modifications disclosed herein with regard to Class 3 glucagon related peptides to enhance the affinity of the glucagon analogs for the GLP-1 receptor. For example, the T29G substitution can be combined with the S16E and N20K amino acid substitutions, optionally with a lactam bridge between amino acids 16 and 20, and optionally with addition of a PEG chain as described herein. In some embodiments, a Class 3 glucagon related peptide comprises the sequence of SEQ ID NO: 64. In some embodiments, the Class 3 glucagon related peptide portion of the glucagon fusion peptide is selected from the group consisting of SEQ ID NO: 55, SEQ ID NO: 2, SEQ ID NO: 3, SEQ ID NO: 4, and SEQ ID NO: 5 wherein a PEG chain, when present at positions 17, 21, 24, or the C-terminal amino acid, or at both 21 and 24, is selected from the range of 500 to 40,000 Daltons. More particularly, in some embodiments, the Class 3 glucagon related peptide segment is selected from the group consisting of SEQ ID NO: 7, SEQ ID NO: 8, and SEQ ID NO: 63, wherein the PEG chain is selected from the range of 500 to 5,000. In some embodiments, the Class 3 glucagon related peptide is a fusion peptide comprising the sequence of SEQ ID NO: 55 and SEQ ID NO: 65 wherein the peptide of SEQ ID NO: 65 is linked to the carboxy terminus of SEQ ID NO: 55.

[0769] In accordance with some embodiments, an additional chemical modification of the Class 3 glucagon related peptide of SEQ ID NO: 10 bestows increased GLP-1 receptor potency to a point where the relative activity at the glucagon and GLP-1 receptors is virtually equivalent. Accordingly, in some embodiments, a Class 3 glucagon related peptide comprises a terminal amino acid comprising an amide group in place of the carboxylic acid group that is present on the native amino acid. The relative activity of the Class 3 glucagon related peptide at the respective glucagon and GLP-1 receptors can be adjusted by further modifications to the Class 3 glucagon related peptide to produce analogs demonstrating about 40% to about 500% or more of the activity of native glucagon at the glucagon receptor and about 20% to about 200% or more of the activity of native GLP-1 at the GLP-1 receptor, e.g. 50-fold, 100-fold or more increase relative to the normal activity of glucagon at the GLP-1 receptor. In some embodiments, the glucagon peptides described herein exhibit up to about 100%, 1000%, 10,000%, 100,000%, or 1,000,000% of the activity of native glucagon at the glucagon receptor. In some embodiments, the glucagon peptides described herein exhibit up to about 100%, 1000%, 10,000%, 100,000%, or 1,000,000% of the activity of native GLP-1 at the GLP-1 receptor.

### Exemplary Embodiments

[0770] In accordance with some embodiments, a glucagon analog is provided comprising the sequence of SEQ ID NO: 55, wherein said analog differs from SEQ ID NO: 55 by 1 to 3 amino acids, selected from positions 1, 2, 3, 5, 7, 10, 11, 13, 14, 17, 18, 19, 21, 24, 27, 28, and 29, wherein said glucagon peptide exhibits at least 20% of the activity of native GLP-1 at the GLP-1 receptor.

[0771] In accordance with some embodiments a glucagon/GLP-1 receptor co-agonist is provided comprising the sequence:

[0772] NH₂-His-Ser-Gln-Gly-Thr-Phe-Thr-Ser-Asp-Tyr-Ser-Lys-Tyr-Leu-Xaa-Xaa-Arg-Arg-Ala-Xaa-Asp-Phe-Val-Xaa-Trp-Leu-Met-Xaa-Xaa-R (SEQ ID NO: 33) wherein the Xaa at position 15 is selected from the group of amino acids consisting of Asp, Glu, cysteic acid, homoglutamic acid and homocysteic acid, Xaa at position 16 is selected from the group of amino acids consisting of Ser, Glu, Gln, homoglutamic acid and homocysteic acid, the Xaa at position 20 is Gln or Lys, the Xaa at position 24 is Gln or Glu, the Xaa at position 28 is Asn, Lys or an acidic amino acid, the Xaa at position 29 is Thr, Gly or an acidic amino acid, and R is COOH or CONH₂, with the proviso that when position 16 is serine, position 20 is Lys, or alternatively when position 16 is serine the position 24 is Glu and either position 20 or position 28 is Lys. In some embodiments the glucagon/GLP-1 receptor co-agonist comprises the sequence of SEQ ID NO: 33 wherein the amino acid at position 28 is aspartic acid and the amino acid at position 29 is glutamic acid. In another embodiment the amino acid at position 28 is the native asparagine, the amino acid at position 29 is glycine and the amino acid sequence of SEQ ID NO: 29 or SEQ ID NO: 65 is covalently linked to the carboxy terminus of SEQ ID NO: 33.

[0773] In some embodiments a co-agonist is provided comprising the sequence of SEQ ID NO: 33 wherein an additional acidic amino acid added to the carboxy terminus of the peptide. In a further embodiment the carboxy terminal amino acid of the glucagon analog has an amide in place of the carboxylic acid group of the natural amino acid. In some embodiments the glucagon analog comprises a sequence selected from the group consisting of SEQ ID NO: 40, SEQ ID NO: 41, SEQ ID NO: 42, SEQ ID NO: 43 and SEQ ID NO: 44.

[0774] In accordance with some embodiments a glucagon peptide analog of SEQ ID NO: 33 is provided, wherein said analog differs from SEQ ID NO: 33 by 1 to 3 amino acids, selected from positions 1, 2, 3, 5, 7, 10, 11, 13, 14, 17, 18, 19, 21 and 27, with the proviso that when the amino acid at position 16 is serine, either position 20 is lysine, or a lactam bridge is formed between the amino acid at position 24 and either the amino acid at position 20 or position 28. In accordance with some embodiments the analog differs from SEQ ID NO: 33 by 1 to 3 amino acids selected from positions 1, 2, 3, 21 and 27. In some embodiments the glucagon peptide analog of SEQ ID NO: 33 differs from that sequence by 1 to 2 amino acids, or in some embodiments by a single amino acid, selected form positions 1, 2, 3, 5, 7, 10, 11, 13, 14, 17, 18, 19, 21 and 27, with the proviso that when the amino acid at position 16 is serine, either position 20 is lysine, or a lactam bridge is formed between the amino acid at position 24 and either the amino acid at position 20 or position 28.

[0775] In accordance with another embodiment a relatively selective GLP-1 receptor agonist is provided comprising the sequence NH₂-His-Ser-Xaa-Gly-Thr-Phe-Thr-Ser-Asp-Tyr-Ser-Lys-Tyr-Leu-Xaa-Xaa-Arg-Arg-Ala-Xaa-Asp-Phe-Val-Xaa-Trp-Leu-Met-Xaa-Xaa-R (SEQ ID NO: 53) wherein the Xaa at position 3 is selected from the group of amino acids consisting of Glu, Orn or Nle, the Xaa at position 15 is selected from the group of amino acids consisting of Asp, Glu, cysteic acid, homoglutamic acid and homocysteic acid, Xaa at position 16 is selected from the group of amino acids consisting of Ser, Glu, Gln, homoglutamic acid and homocysteic acid, the Xaa at position 20 is Gln or Lys, the Xaa at position 24 is Gln or Glu, the Xaa at position 28 is Asn, Lys or an acidic amino acid, the Xaa at position 29 is Thr, Gly or an acidic amino acid, and R is COOH, CONH2, SEQ ID NO: 26 or SEQ ID NO: 29, with the proviso that when position 16 is serine, position 20 is Lys, or alternatively when position 16 is serine the position 24 is Glu and either position 20 or position 28 is Lys. In some embodiments the amino acid at position 3 is glutamic acid. In some embodiments the acidic amino acid substituted at position 28 and/or 29 is aspartic acid or glutamic acid. In some embodiments the glucagon peptide, including a co-agonist peptide, comprises the sequence of SEQ ID NO: 33 further comprising an additional acidic amino acid added to the carboxy terminus of the peptide. In a further embodiment the carboxy terminal amino acid of the glucagon analog has an amide in place of the carboxylic acid group of the natural amino acid.

[0776] In accordance with some embodiments a glucagon/GLP-1 receptor co-agonist is provided comprising a modified glucagon peptide selected from the group consisting of:

[0777] NH₂-His-Ser-Gln-Gly-Thr-Phe-Thr-Ser-Asp-Tyr-Ser-Lys-Tyr-Leu-Xaa-Xaa-Arg-Arg-Ala-Xaa-Asp-Phe-Val-Xaa-Trp-Leu-Met-Xaa-Xaa-R (SEQ ID NO: 34), wherein the Xaa at position 15 is selected from the group of amino acids consisting of Asp, Glu, cysteic acid, homoglutamic acid and homocysteic acid, Xaa at position 16 is selected from the group of amino acids consisting of Ser, Glu, Gln, homoglutamic acid and homocysteic acid, the Xaa at position 20 is Gln or Lys, the Xaa at position 24 is Gln or Glu and the Xaa at position 28 is Asn, Asp or Lys, R is COOH or CONH₂, the Xaa at position 29 is Thr or Gly, and R is COOH, CONH₂, SEQ ID NO: 26 or SEQ ID NO: 29, with the proviso that when position 16 is serine, position 20 is Lys, or alternatively when position 16 is serine the position 24 is Glu and either position 20 or position 28 is Lys. In some embodiments R is CONH₂, the Xaa at position 15 is Asp, the Xaa at position 16 is selected from the group of amino acids consisting of Glu, Gln, homoglutamic acid and homocysteic acid, the Xaas at positions 20 and 24 are each Gln the Xaa at position 28 is Asn or Asp and the Xaa at position 29 is Thr. In some embodiments the Xaas at positions 15 and 16 are each Glu, the Xaas at positions 20 and 24 are each Gln, the Xaa at position 28 is Asn or Asp, the Xaa at position 29 is Thr and R is CONH₂.

[0778] It has been reported that certain positions of the native glucagon peptide can be modified while retaining at least some of the activity of the parent peptide. Accordingly, applicants anticipate that one or more of the amino acids located at positions at positions 2, 5, 7, 10, 11, 12, 13, 14, 17, 18, 19, 20, 21, 24, 27, 28 or 29 of the peptide of SEQ ID NO: 11 can be substituted with an amino acid different from that present in the native glucagon peptide, and still retain activity at the glucagon receptor. In some embodiments the methionine residue present at position 27 of the native peptide is changed to leucine or norleucine to prevent oxidative degradation of the peptide. In another embodiment the amino acid at position 20 is substituted with Lys, Arg, Orn or Citrulline and/or position 21 is substituted with Glu, homoglutamic acid or homocysteic acid.

[0779] In some embodiments a glucagon analog of SEQ ID NO: 20 is provided wherein 1 to 6 amino acids, selected from positions 1, 2, 5, 7, 10, 11, 13, 14, 17, 18, 19, 21, 27, 28 or 29 of the analog differ from the corresponding amino acid of SEQ ID NO: 1, with the proviso that when the amino acid at position 16 is serine, position 20 is Lys, or alternatively when position 16 is serine the position 24 is Glu and either position 20 or position 28 is Lys. In accordance with another embodiment a glucagon analog of SEQ ID NO: 20 is provided wherein 1 to 3 amino acids selected from positions 1, 2, 5, 7, 10, 11, 13, 14, 17, 18, 19, 20, 21, 27, 28 or 29 of the analog differ from the corresponding amino acid of SEQ ID NO: 1. In another embodiment, a glucagon analog of SEQ ID NO: 8, SEQ ID NO: 9 or SEQ ID NO: 11 is provided wherein 1 to 2 amino acids selected from positions 1, 2, 5, 7, 10, 11, 13, 14, 17, 18, 19, 20 or 21 of the analog differ from the corresponding amino acid of SEQ ID NO: 1, and in a further embodiment the one to two differing amino acids represent conservative amino acid substitutions relative to the amino acid present in the native glucagon sequence (SEQ ID NO: 1). In some embodiments a glucagon peptide of SEQ ID NO: 12, SEQ ID NO: 13, SEQ ID NO: 14 or SEQ ID NO: 15 is provided wherein the glucagon peptide further comprises one, two or three amino acid substitutions at positions selected from positions 2, 5, 7, 10, 11, 13, 14, 17, 18, 19, 20, 21, 27 or 29. In some embodiments the substitutions at positions 2, 5, 7, 10, 11, 13, 14, 16, 17, 18, 19, 20, 21, 27 or 29 are conservative amino acid substitutions.

[0780] In accordance with some embodiments a glucagon/GLP-1 receptor co-agonist is provided comprising a variant of the sequence of SEQ ID NO 33, wherein 1 to 10 amino acids selected from positions 16, 17, 18, 20, 21, 23, 24, 27, 28 and 29, respectively, of the variant differ from the corresponding amino acid of SEQ ID NO: 1. In accordance with some embodiments a variant of the sequence of SEQ ID NO 33 is provided wherein the variant differs from SEQ ID NO: 33 by one or more amino acid substitutions selected from the group consisting of Gln17, Ala18, Glu21, Ile23, Ala24, Val27 and Gly29. In accordance with some embodiments a glucagon/GLP-1 receptor co-agonist is provided comprising variants of the sequence of SEQ ID NO 33, wherein 1 to 2 amino acids selected from positions 17-26 of the variant differ from the corresponding amino acid of SEQ ID NO: 1. In accordance with some embodiments a variant of the sequence of SEQ ID NO 33 is provided wherein the variant differs from SEQ ID NO: 33 by an amino acid substitution selected from the group consisting of Gln17, Ala18, Glu21, Ile23 and Ala24. In accordance with some embodiments a variant of the sequence of SEQ ID NO 33 is provided wherein the variant differs from SEQ ID NO: 33 by an amino acid substitution at position 18 wherein the substituted amino acid is selected from the group consisting of Ala, Ser, Thr, and Gly. In accordance with some embodiments a variant of the sequence of SEQ ID NO 33 is provided wherein the variant differs from SEQ ID NO: 33 by an amino acid substitution of Ala at position 18. Such variations are encompassed by SEQ ID NO: 55. In another embodiment a glucagon/GLP-1 receptor co-agonist is provided comprising variants of the sequence of SEQ ID NO 33, wherein 1 to 2 amino acids selected from positions 17-22 of the variant differ from the corresponding amino acid of SEQ ID NO: 1, and in a further embodiment a variant of SEQ ID NO 33 is provided wherein the variant differs from SEQ ID NO: 33 by for 2 amino acid substitutions at positions 20 and 21. In accordance with some embodiments a glucagon/GLP-1 receptor co-agonist is provided comprising the sequence:

[0781] NH₂-His-Ser-Gln-Gly-Thr-Phe-Thr-Ser-Asp-Tyr-Ser-Lys-Tyr-Leu-Xaa-Xaa-Arg-Arg-Ala-Xaa-Xaa-Phe-Val-Xaa-Trp-Leu-Met-Xaa-Xaa-R (SEQ ID NO: 51), wherein the Xaa at position 15 is Asp, Glu, cysteic acid, homoglutamic acid or homocysteic acid, the Xaa at position 16 is Ser, Glu, Gln, homoglutamic acid or homocysteic acid, the Xaa at position 20 is Gln, Lys, Arg, Orn or citrulline, the Xaa at position 21 is Asp, Glu, homoglutamic acid or homocysteic acid, the Xaa at position 24 is Gln or Glu, the Xaa at position 28 is Asn, Lys or an acidic amino acid, the Xaa at position 29 is Thr or an acid amino acid and R is COOH or CONH₂. In some embodiments R is CONH₂. In accordance with some embodiments a glucagon/GLP-1 receptor co-agonist is provided comprising a variant of SEQ ID NO: 11, SEQ ID NO: 12, SEQ ID NO: 13, SEQ ID NO: 14, SEQ ID NO: 15, SEQ ID NO: 47, SEQ ID NO: 48 or SEQ ID NO: 49, wherein the variant differs from said sequence by an amino acid substitution at position 20. In some embodiments the amino acid substitution is selected form the group consisting of Lys, Arg, Orn or citrulline for position 20.

[0782] In some embodiments a glucagon agonist is provided comprising an analog peptide of SEQ ID NO: 34 wherein the analog differs from SEQ ID NO: 34 by having an amino acid other than serine at position 2. In some embodiments the serine residue is substituted with aminoisobutyric acid, D-alanine, and in some embodiments the serine residue is substituted with aminoisobutyric acid. Such modifications suppresses cleavage by dipeptidyl peptidase IV while retaining the inherent potency of the parent compound (e.g. at least 75, 80, 85, 90, 95% or more of the potency of the parent compound). In some embodiments the solubility of the analog is increased, for example, by introducing one, two, three or more charged amino acid(s) to the C-terminal portion of native glucagon, preferably at a position C-terminal to position 27. In exemplary embodiments, one, two, three or all of the charged amino acids are negatively charged. In another embodiment the analog further comprises an acidic amino acid substituted for the native amino acid at position 28 or 29 or an acidic amino acid added to the carboxy terminus of the peptide of SEQ ID NO: 34.

[0783] In some embodiments the glucagon analogs disclosed herein are further modified at position 1 or 2 to reduce susceptibility to cleavage by dipeptidyl peptidase IV. In some embodiments a glucagon analog of SEQ ID NO: 9, SEQ ID NO: 11, SEQ ID NO: 12, SEQ ID NO: 13, SEQ ID NO: 14 or SEQ ID NO: 15 is provided wherein the analog differs from the parent molecule by a substitution at position 2 and exhibits reduced susceptibility (i.e., resistance) to cleavage by dipeptidyl peptidase IV. More particularly, in some embodiments position 2 of the analog peptide is substituted with an amino acid selected from the group consisting of D-serine, D-alanine, valine, amino n-butyric acid, glycine, N-methyl serine and aminoisobutyric acid. In some embodiments position 2 of the analog peptide is substituted with an amino acid selected from the group consisting of D-serine, D-alanine, glycine, N-methyl serine and aminoisobutyric acid. In another embodiment position 2 of the analog peptide is substituted with an amino acid selected from the group consisting of D-serine, glycine, N-methyl serine and aminoisobutyric acid. In some embodiments the amino acid at position 2 is not D-serine. In some embodiments the glucagon peptide comprises the sequence of SEQ ID NO: 21 or SEQ ID NO: 22.

[0784] In some embodiments a glucagon analog of SEQ ID NO: 9, SEQ ID NO: 11, SEQ ID NO: 12, SEQ ID NO: 13, SEQ ID NO: 14 or SEQ ID NO: 15 is provided wherein the analog differs from the parent molecule by a substitution at position 1 and exhibits reduced susceptibility (i.e., resistance) to cleavage by dipeptidyl peptidase IV. More particularly, position 1 of the analog peptide is substituted with an amino acid selected from the group consisting of D-histidine, alpha, alpha-dimethyl imidiazole acetic acid (DMIA), N-methyl histidine, alpha-methyl histidine, imidazole acetic acid, desaminohistidine, hydroxyl-histidine, acetyl-histidine and homo-histidine. In another embodiment a glucagon agonist is provided comprising an analog peptide of SEQ ID NO: 34 wherein the analog differs from SEQ ID NO: 34 by having an amino acid other than histidine at position 1. In some embodiments the solubility of the analog is increased, for example, by introducing one, two, three or more charged amino acid(s) to the C-terminal portion of native glucagon, preferably at a position C-terminal to position 27. In exemplary embodiments, one, two, three or all of the charged amino acids are negatively charged. In another embodiment the analog further comprises an acidic amino acid substituted for the native amino acid at position 28 or 29 or an acidic amino acid added to the carboxy terminus of the peptide of SEQ ID NO: 34. In some embodiments the acidic amino acid is aspartic acid or glutamic acid.

[0785] In some embodiments the glucagon/GLP-1 receptor co-agonist comprises a sequence of SEQ ID NO: 20 further comprising an additional carboxy terminal extension of one amino acid or a peptide selected from the group consisting of SEQ ID NO: 26, SEQ ID NO: 27 and SEQ ID NO: 28. In the embodiment wherein a single amino acid is added to the carboxy terminus of SEQ ID NO: 20, the amino acid is typically selected from one of the 20 common amino acids, and in some embodiments the additional carboxy terminus amino acid has an amide group in place of the carboxylic acid of the native amino acid. In some embodiments the additional amino acid is selected from the group consisting of glutamic acid, aspartic acid and glycine.

[0786] In an alternative embodiment a glucagon/GLP-1 receptor co-agonist is provided wherein the peptide comprises at least one lactam ring formed between the side chain of a glutamic acid residue and a lysine residue, wherein the glutamic acid residue and a lysine residue are separated by three amino acids. In some embodiments the carboxy terminal amino acid of the lactam bearing glucagon peptide has an amide group in place of the carboxylic acid of the native amino acid. More particularly, in some embodiments a glucagon and GLP-1 co-agonist is provided comprising a modified glucagon peptide selected from the group consisting of:

(SEQ ID NO: 66)
NH₂-His-Ser-Gln-Gly-Thr-Phe-Thr-Ser-Asp-Tyr-Ser-
Lys-Tyr-Leu-Asp-Glu-Arg-Arg-Ala-Gln-Asp-Phe-Val-
Gln-Trp-Leu-Met-Xaa-Xaa-R
(SEQ ID NO: 67)
NH₂-His-Ser-Gln-Gly-Thr-Phe-Thr-Ser-Asp-Tyr-Ser-
Lys-Tyr-Leu-Asp-Glu-Arg-Arg-Ala-Lys-Asp-Phe-Val-
Gln-Trp-Leu-Met-Xaa-Xaa-R
(SEQ ID NO: 68)
NH₂-His-Ser-Gln-Gly-Thr-Phe-Thr-Ser-Asp-Tyr-Ser-
Lys-Tyr-Leu-Asp-Ser-Arg-Arg-Ala-Lys-Asp-Phe-Val-
Glu-Trp-Leu-Met-Xaa-Xaa-R
(SEQ ID NO: 69)
NH₂-His-Ser-Gln-Gly-Thr-Phe-Thr-Ser-Asp-Tyr-Ser-
Lys-Tyr-Leu-Asp-Ser-Arg-Arg-Ala-Gln-Asp-Phe-Val-
Glu-Trp-Leu-Met-Lys-Xaa-R
(SEQ ID NO: 16)
NH₂-His-Ser-Gln-Gly-Thr-Phe-Thr-Ser-Asp-Tyr-Ser-
Lys-Tyr-Leu-Asp-Glu-Arg-Arg-Ala-Lys-Asp-Phe-Val-
Glu-Trp-Leu-Met-Asn-Thr-R
(SEQ ID NO: 17)
NH₂-His-Ser-Gln-Gly-Thr-Phe-Thr-Ser-Asp-Tyr-Ser-
Lys-Tyr-Leu-Asp-Glu-Arg-Arg-Ala-Gln-Asp-Phe-Val-
Glu-Trp-Leu-Met-Lys-Thr-R
(SEQ ID NO: 18)
NH₂-His-Ser-Gln-Gly-Thr-Phe-Thr-Ser-Asp-Tyr-Ser-
Lys-Tyr-Leu-Asp-Glu-Arg-Arg-Ala-Lys-Asp-Phe-Val-
Glu-Trp-Leu-Met-Lys-Thr-R

[0787] wherein Xaa at position 28 is Asp, or Asn, the Xaa at position 29 is Thr or Gly, R is selected from the group consisting of COOH, CONH₂, glutamic acid, aspartic acid, glycine, SEQ ID NO: 26, SEQ ID NO: 27 and SEQ ID NO: 28, and a lactam bridge is formed between Lys at position 12 and Glu at position 16 for SEQ ID NO: 66, between Glu at position 16 and Lys at position 20 for SEQ ID NO: 67, between Lys at position 20 and Glu at position 24 for SEQ ID NO: 68, between Glu at position 24 and Lys at position 28 for SEQ ID NO: 69, between Lys at position 12 and Glu at position 16 and between Lys at position 20 and Glu at position 24 for SEQ ID NO: 16, between Lys at position 12 and Glu at position 16 and between Glu at position 24 and Lys at position 28 for SEQ ID NO: 17 and between Glu at position 16 and Lys at position 20 and between Glu at position 24 and Lys at position 28 for SEQ ID NO: 18. In some embodiments R is selected from the group consisting of COOH, CONH₂, glutamic acid, aspartic acid, glycine, the amino acid at position 28 is Asn, and the amino acid at position 29 is threonine. In some embodiments R is CONH₂, the amino acid at position 28 is Asn and the amino acid at position 29 is threonine. In another embodiment R is selected from the group consisting of SEQ ID NO: 26, SEQ ID NO: 29 and SEQ ID NO: 65 and the amino acid at position 29 is glycine.

[0788] In a further embodiment the glucagon/GLP-1 receptor co-agonist is selected from the group consisting of SEQ ID NO: 11, SEQ ID NO: 12, SEQ ID NO: 13, SEQ ID NO: 14, SEQ ID NO: 15, SEQ ID NO: 16, SEQ ID NO: 17 and SEQ ID NO: 18, wherein the peptide further comprises an additional carboxy terminal extension of one amino acid or a peptide selected from the group consisting of SEQ ID NO: 26, SEQ ID NO: 27 and SEQ ID NO: 28. In some embodiments the terminal extension comprises the sequence of SEQ ID NO: 26, SEQ ID NO: 29 or SEQ ID NO: 65 and the glucagon peptide comprises the sequence of SEQ ID NO: 55. In some embodiments the glucagon/GLP-1 receptor co-agonist comprises the sequence of SEQ ID NO: 33 wherein the amino acid at position 16 is glutamic acid, the amino acid at position 20 is lysine, the amino acid at position 28 is asparagine and the amino acid sequence of SEQ ID No: 26 or SEQ ID NO: 29 is linked to the carboxy terminus of SEQ ID NO: 33.

[0789] In the embodiment wherein a single amino acid is added to the carboxy terminus of SEQ ID NO: 20, the amino acid is typically selected from one of the 20 common amino acids, and in some embodiments the amino acid has an amide group in place of the carboxylic acid of the native amino acid. In some embodiments the additional amino acid is selected from the group consisting of glutamic acid and aspartic acid and glycine. In the embodiments wherein the glucagon agonist analog further comprises a carboxy terminal extension, the carboxy terminal amino acid of the extension, in some embodiments, ends in an amide group or an ester group rather than a carboxylic acid.

[0790] In another embodiment the glucagon/GLP-1 receptor co-agonist comprises the sequence: NH₂-His-Ser-Gln-Gly-Thr-Phe-Thr-Ser-Asp-Tyr-Ser-Lys-Tyr-Leu-Asp-Glu-Arg-Arg-Ala-Gln-Asp-Phe-Val-Gln-Trp-Leu-Met-Asn-Thr-Xaa-CONH₂ (SEQ ID NO: 19), wherein the Xaa at position 30 represents any amino acid. In some embodiments Xaa is selected from one of the 20 common amino acids, and in some embodiments the amino acid is glutamic acid, aspartic acid or glycine. The solubility of this peptide can be further improved by covalently linking a PEG chain to the side chain of amino acid at position 17, 21, 24 or 30 of SEQ ID NO: 19. In a further embodiment the peptide comprises an additional carboxy terminal extension of a peptide selected from the group consisting of SEQ ID NO: 26, SEQ ID NO: 27 and SEQ ID NO: 28. In accordance with some embodiments the glucagon/GLP-1 receptor co-agonist comprises the sequence of SEQ ID NO: 30, SEQ ID NO: 31 and SEQ ID NO: 32.

[0791] Additional site specific modifications internal to the glucagon sequence of SEQ ID NO: 11, SEQ ID NO: 12, SEQ ID NO: 13, SEQ ID NO: 14, SEQ ID NO: 15, SEQ ID NO: 16, SEQ ID NO: 17, SEQ ID NO: 18, SEQ ID NO: 19 and SEQ ID NO: 64 can be made to yield a set of glucagon agonists that possess variable degrees of GLP-1 agonism. Accordingly, peptides that possess virtually identical in vitro potency at each receptor have been prepared and characterized. Similarly, peptides with tenfold selectively enhanced potency at each of the two receptors have been identified and characterized. As noted above substitution of the serine residue at position 16 with glutamic acid enhances the potency of native glucagon at both the Glucagon and GLP-1 receptors, but maintains approximately a tenfold selectivity for the glucagon receptor. In addition by substituting the native glutamine at position 3 with glutamic acid (SEQ ID NO: 22) generates a glucagon analog that exhibits approximately a tenfold selectivity for the GLP-1 receptor.

[0792] The solubility of the glucagon/GLP-1 co-agonist peptides can be further enhanced in aqueous solutions at physiological pH, while retaining the high biological activity relative to native glucagon by the introduction of hydrophilic groups at positions 16, 17, 21, and 24 of the peptide, or by the addition of a single modified amino acid (i.e., an amino acid modified to comprise a hydrophilic group) at the carboxy terminus of the glucagon/GLP-1 co-agonist peptide. In accordance with some embodiments the hydrophilic group comprises a polyethylene (PEG) chain. More particularly, in some embodiments the glucagon peptide comprises the sequence of SEQ ID NO: 10, SEQ ID NO: 11, SEQ ID NO: 12, SEQ ID NO: 13, SEQ ID NO: 14, SEQ ID NO: 15, SEQ ID NO: 16, SEQ ID NO: 17 or SEQ ID NO: 18 wherein a PEG chain is covalently linked to the side chain of an amino acids at position 16, 17, 21, 24, 29 or the C-terminal amino acid of the glucagon peptide, with the proviso that when the peptide comprises SEQ ID NO: 10, SEQ ID NO: 11, SEQ ID NO: 12 or SEQ ID NO: 13 the polyethylene glycol chain is covalently bound to an amino acid residue at position 17, 21 or 24, when the peptide comprises SEQ ID NO: 14 or SEQ ID NO: 15 the polyethylene glycol chain is covalently bound to an amino acid residue at position 16, 17 or 21, and when the peptide comprises SEQ ID NO: 16, SEQ ID NO: 17 or SEQ ID NO: 18 the polyethylene glycol chain is covalently bound to an amino acid residue at position 17 or 21.

[0793] In some embodiments the glucagon peptide comprises the sequence of SEQ ID NO: 11, SEQ ID NO: 12 or SEQ ID NO: 13, wherein a PEG chain is covalently linked to the side chain of an amino acids at position 17, 21, 24, or the C-terminal amino acid of the glucagon peptide, and the carboxy terminal amino acid of the peptide has an amide group in place of the carboxylic acid group of the native amino acid. In some embodiments the glucagon/GLP-1 receptor co-agonist peptide comprises a sequence selected from the group consisting of SEQ ID NO: 12, SEQ ID NO: 13, SEQ ID NO: 14, SEQ ID NO: 15, SEQ ID NO: 16, SEQ ID NO: 17, SEQ ID NO: 18 and SEQ ID NO: 19, wherein a PEG chain is covalently linked to the side chain of an amino acid at position 17, 21 or 24 of SEQ ID NO: 12, SEQ ID NO: 13 and SEQ ID NO: 19, or at position 16, 17 or 21 of SEQ ID NO: 14 and SEQ ID NO: 15 or at position 17 or 21 of SEQ ID NO: 16, SEQ ID NO: 17 and SEQ ID NO: 18 of the glucagon peptide. In another embodiment the glucagon/GLP-1 receptor co-agonist peptide comprises the sequence of SEQ ID NO: 11 or SEQ ID NO: 19, wherein a PEG chain is covalently linked to the side chain of an amino acids at position 17, 21 or 24 or the C-terminal amino acid of the glucagon peptide.

[0794] In accordance with some embodiments, and subject to the proviso limitations described in the preceding paragraphs, the glucagon co-agonist peptide is modified to contain one or more amino acid substitution at positions 16, 17, 21, 24, or 29 or the C-terminal amino acid, wherein the native amino acid is substituted with an amino acid having a side chain suitable for crosslinking with hydrophilic moieties, including for example, PEG. The native peptide can be substituted with a naturally occurring amino acid or a synthetic (non-naturally occurring) amino acid. Synthetic or non-naturally occurring amino acids refer to amino acids that do not naturally occur in vivo but which, nevertheless, can be incorporated into the peptide structures described herein. Alternatively, the amino acid having a side chain suitable for crosslinking with hydrophilic moieties, including for example, PEG, can be added to the carboxy terminus of any of the glucagon analogs disclosed herein. In accordance with some embodiments an amino acid substitution is made in the glucagon/GLP-1 receptor co-agonist peptide at a position selected from the group consisting of 16, 17, 21, 24, or 29 replacing the native amino acid with an amino acid selected from the group consisting of lysine, cysteine, ornithine, homocysteine and acetyl phenylalanine, wherein the substituting amino acid further comprises a PEG chain covalently bound to the side chain of the amino acid. In some embodiments a glucagon peptide selected form the group consisting of SEQ ID NO: 12, SEQ ID NO: 13, SEQ ID NO: 14, SEQ ID NO: 15, SEQ ID NO: 16, SEQ ID NO: 17, SEQ ID NO: 18, and SEQ ID NO: 19 is further modified to comprise a PEG chain is covalently linked to the side chain of an amino acid at position 17 or 21 of the glucagon peptide. In some embodiments the pegylated glucagon/GLP-1 receptor co-agonist further comprises the sequence of SEQ ID NO: 26, SEQ ID NO: 27 or SEQ ID NO: 29.

[0795] In another embodiment the glucagon peptide comprises the sequence of SEQ ID NO: 55 or SEQ ID NO: 56, further comprising a C-terminal extension of SEQ ID NO: 26, SEQ ID NO: 29 or SEQ ID NO: 65 linked to the C-terminal amino acid of SEQ ID NO: 55 or SEQ ID NO: 56, and optionally further comprising a PEG chain covalently linked to the side chain of an amino acids at position 17, 18, 21, 24 or 29 or the C-terminal amino acid of the peptide. In another embodiment the glucagon peptide comprises the sequence of SEQ ID NO: 55 or SEQ ID NO: 56, wherein a PEG chain is covalently linked to the side chain of an amino acids at position 21 or 24 of the glucagon peptide and the peptide further comprises a C-terminal extension of SEQ ID NO: 26, or SEQ ID NO: 29.

[0796] In another embodiment the glucagon peptide comprises the sequence of SEQ ID NO: 55, or SEQ ID NO: 33 or SEQ ID NO: 34, wherein an additional amino acid is added to the carboxy terminus of SEQ ID NO: 33 or SEQ ID NO: 34, and a PEG chain is covalently linked to the side chain of the added amino acid. In a further embodiment, the pegylated glucagon analog further comprises a C-terminal extension of SEQ ID NO: 26 or SEQ ID NO: 29 linked to the C-terminal amino acid of SEQ ID NO: 33 or SEQ ID NO: 34. In another embodiment the glucagon peptide comprises the sequence of SEQ ID NO: 19, wherein a PEG chain is covalently linked to the side chain of the amino acid at position 30 of the glucagon peptide and the peptide further comprises a C-terminal extension of SEQ ID NO: 26 or SEQ ID NO: 29 linked to the C-terminal amino acid of SEQ ID NO: 19.

[0797] The polyethylene glycol chain may be in the form of a straight chain or it may be branched. In accordance with some embodiments the polyethylene glycol chain has an average molecular weight selected from the range of about 500 to about 10,000 Daltons. In some embodiments the polyethylene glycol chain has an average molecular weight selected from the range of about 1,000 to about 5,000 Daltons. In an alternative embodiment the polyethylene glycol chain has an average molecular weight selected from the range of about 10,000 to about 20,000 Daltons. In accordance with some embodiments the pegylated glucagon peptide comprises two or more polyethylene glycol chains covalently bound to the glucagon peptide wherein the total molecular weight of the glucagon chains is about 1,000 to about 5,000 Daltons. In some embodiments the pegylated glucagon agonist comprises a peptide consisting of SEQ ID NO: 5 or a glucagon agonist analog of SEQ ID NO: 5, wherein a PEG chain is covalently linked to the amino acid residue at position 21 and at position 24, and wherein the combined molecular weight of the two PEG chains is about 1,000 to about 5,000 Daltons.

[0798] In certain exemplary embodiments, the glucagon peptide comprises the amino acid sequence of SEQ ID NO: 1 with up to ten amino acid modifications and comprises an amino acid at position 10 which is acylated or alkylated. In some embodiments, the amino acid at position 10 is acylated or alkylated with a C4 to C30 fatty acid. In certain aspects, the amino acid at position 10 comprises an acyl group or an alkyl group which is non-native to a naturally-occurring amino acid.

[0799] In certain embodiments, the glucagon peptide comprising an amino acid at position 10 which is acylated or alkylated comprises a stabilized alpha helix. Accordingly, in certain aspects, the glucagon peptide comprises an acyl or alkyl group as described herein and an intramolecular bridge, e.g., a covalent intramolecular bridge (e.g., a lactam bridge) between the side chains of an amino acid at position i and an amino acid at position i+4, wherein i is 12, 16, 20, or 24. Alternatively or additionally, the glucagon peptide comprises an acyl or alkyl group as described herein and one, two, three or more of positions 16, 20, 21 and/or 24 of the glucagon peptide are substituted with an α, α-disubstituted amino acid, e.g., Aib. In some instances, the non-native glucagon peptide comprises Glu at position 16 and Lys at position 20, wherein optionally a lactam bridge links the Glu and the Lys, and, optionally, the glucagon peptide further comprises one or more modifications selected from the group consisting of: Gln at position 17, Ala at position 18, Glu at position 21, Ile at position 23, and Ala at position 24.

[0800] Also, in any of the embodiments, wherein the glucagon peptide comprises an amino acid at position 10 which is acylated or alkylated, the glucagon peptide can further comprise a C-terminal amide in lieu of the C-terminal alpha carboxylate.

[0801] In some embodiments, the glucagon peptide comprising an acyl or alkyl group as described herein further comprises an amino acid substitution at position 1, at position 2, or at positions 1 and 2, wherein the amino acid substitution(s) achieve DPP-IV protease resistance. For example, the His at position 1 may be substituted with an amino acid selected from the group consisting of: D-histidine, alpha, alpha-dimethyl imidiazole acetic acid (DMIA), N-methyl histidine, alpha-methyl histidine, imidazole acetic acid, desaminohistidine, hydroxyl-histidine, acetyl-histidine and homo-histidine. Alternatively or additionally, the Ser at position 2 may be substituted with an amino acid selected from the group consisting of: D-serine, alanine, D-alanine, valine, glycine, N-methyl serine, N-methyl alanine, and amino isobutyric acid. In some embodiments the amino acid at position 2 is not D-serine.

[0802] The glucagon peptide comprising the amino acid at position 10 which is acylated or alkylated as described herein can comprise any amino acid sequence which is substantially related to SEQ ID NO: 1. For instance, the glucagon peptide comprises SEQ ID NO: 1 with up to 10 amino acid modifications (e.g., 0, 1, 2, 3, 4, 5, 6, 7, 8, 9, 10 modifications). In certain embodiments, the amino acid sequence of the acylated or alkylated glucagon peptide is greater than 25% identical to SEQ ID NO: 1 (e.g., greater than 30%, 35%, 40%, 50%, 60%, 70% 75%, 80%, 85%, 90%, 95%, 96%, 97%, 98%, 99%, or nearly 100% identical to SEQ ID NO: 1). In certain specific embodiments, the glucagon peptide is one which comprises SEQ ID NOs: 55 with an amino acid at position 10 acylated or alkylated as described herein. The glucagon peptide can be any of SEQ ID NOs: 55, 55 with 1 or 2 amino acid modifications, 2-4, 9-18, 20, 23-25, 33, 40-44, 53, 56, 61, 62, 64, 66-514, and 534.

[0803] The acyl or alkyl group of these embodiments may be any acyl or alkyl group described herein. For example, the acyl group may be a C4 to C30 (e.g., C8 to C24) fatty acyl group and the alkyl group may be a C4 to C30 (e.g., C8 to C24) alkyl group.

[0804] The amino acid to which the acyl or alkyl group is attached may be any of the amino acids described herein, e.g., an amino acid of any of Formula I (e.g., Lys), Formula II, and Formula III.

[0805] In some embodiments, the acyl group or alkyl group is directly attached to the amino acid at position 10. In some embodiments, the acyl or alkyl group is attached to the amino acid at position 10 via a spacer, such as, for example, a spacer which is 3 to 10 atoms in length, e.g., an amino acid or dipeptide. Suitable spacers for purposes of attaching an acyl or alkyl group are described herein.

[0806] In accordance with some embodiments, the Class 3 glucagon related peptide may be an analog of any of the foregoing Class 3 glucagon related peptides as described herein, which analog exhibits agonist activity at the GIP receptor. The activity level of the analog at the glucagon receptor, the GLP-1 receptor, and the GIP receptor, the potency at each of these receptors, and the selectivity for each of these receptors may be in accordance with the teachings of Class 2 glucagon related peptides described herein. See, the teachings under the subsection of the Class 2 glucagon related peptide section entitled “Activity.”

[0807] In some embodiments of the invention, an analog of a glucagon peptide, which analog exhibits agonist activity at the GIP receptor, is provided. The analog in certain embodiments comprises the amino acid sequence of SEQ ID NO: 1 with at least one amino acid modification (optionally, up to 15 amino acid modifications), and an extension of 1 to 21 amino acids C-terminal to the amino acid at position 29 of the analog.

[0808] In certain aspects, the analogs comprise at least one amino acid modification and up to 15 amino acid modifications (e.g., 1, 2, 3, 4, 5, 6, 7, 8, 9, 10, 11, 12, 13, 14, 15 amino acid modifications, up to 10 amino acid modifications). In certain embodiments, the analogs comprise at least one amino acid modification at up to 10 amino acid modifications and additional conservative amino acid modifications. Conservative amino acid modifications are described herein.

[0809] In some aspects, at least one of the amino acid modifications confers a stabilized alpha helix structure in the C-terminal portion of the analog. Modifications which achieve a stabilized alpha helix structure are described herein. See, for example, the teachings under the section entitled Stabilization of the alpha helix/Intramolecular bridges. In some aspects, the analog comprises an intramolecular bridge (e.g., a covalent intramolecular bridge, a non-covalent intramolecular bridge) between the side chains of two amino acids of the analog. In certain aspects, an intramolecular bridge links the side chains of the amino acids at positions i and i+4, wherein i is 12, 13, 16, 17, 20, or 24. In other aspects, an intramolecular bridge connects the side chains of the amino acids at positions j and j+3, wherein j is 17, or at positions k and k+7″ wherein k is any integer between 12 and 22. In certain embodiments, the intramolecular bridge is a covalent intramolecular bridge, e.g., a lactam bridge. In specific aspects, the lactam bridge connects the side chains of the amino acids at positions 16 and 20. In particular aspects, one of the amino acids at positions 16 and 20 is a positive-charged amino acid and the other is a negative-charged amino acid. For example, the analog can comprise a lactam bridge connecting the side chains of a Glu at position 16 and a Lys at position 20. In other aspects, the negative-charged amino acid and the positive-charged amino acid form a salt bridge. In this instance, the intramolecular bridge is a non-covalent intramolecular bridge.

[0810] In particular aspects, the amino acid modification which confers a stabilized alpha helix is an insertion or substitution of an amino acid of SEQ ID NO: 1 with an α,α-disubstituted amino acid. Suitable α,α-disubstituted amino acids for purposes of stabilizing the alpha helix are described herein and include, for example, Aib. In some aspects, one, two, three, or more of the amino acids at positions 16, 20, 21, and 24 of SEQ ID NO: 1 are substituted with an α,α-disubstituted amino acid, e.g., Aib. In particular embodiments, the amino acid at position 16 is Aib.

[0811] The analog which exhibits agonist activity at the GIP receptor can comprise additional modifications, such as any of those described herein. For instance, the amino acid modifications may increase or decrease activity at one or both of the GLP-1 receptor and glucagon receptor. The amino acid modifications may increase stability of the peptide, e.g., increase resistance to DPP-IV protease degradation, stabilize the bond between amino acids 15 and 16. The amino acid modifications may increase the solubility of the peptide and/or alter the time of action of the analog at any of the GIP, glucagon, and GLP-1 receptors. A combination of any of these types of modifications may be present in the analogs which exhibit agonist activity at the GIP receptor.

[0812] Accordingly, in some aspects, the analog comprises the amino acid sequence of SEQ ID NO: 1 with one or more of: Gln at position 17, Ala at position 18, Glu at position 21, Ile at position 23, and Ala or Cys at position 24, or conservative amino acid substitutions thereof. In some aspects, the analog comprises a C-terminal amide in place of the C-terminal alpha carboxylate. In certain embodiments, the analog comprises an amino acid substitution at position 1, position 2, or positions 1 and 2, which substitution(s) achieve DPP-IV protease resistance. Suitable amino acid substitutions are described herein. For example, DMIA at position 1 and/or d-Ser or Aib at position 2. In some embodiments, the amino acid at position 2 is not D-serine.

[0813] Additionally or alternatively, the analog may comprise one or a combination of: (a) Ser at position 2 substituted with Ala; (b) Gln at position 3 substituted with Glu or a glutamine analog; (c) Thr at position 7 substituted with a Ile; (d) Tyr at position 10 substituted with Trp or an amino acid comprising an acyl or alkyl group which is non-native to a naturally-occurring amino acid; (e) Lys at position 12 substituted with Ile; (f) Asp at position 15 substituted with Glu; (g) Ser at position 16 substituted with Glu; (h) Gln at position 20 substituted with Ser, Thr, Ala, Aib; (i) Gln at position 24 substituted with Ser, Thr, Ala, Aib; (j) Met at position 27 substituted with Leu or Nle; (k) Asn at position 29 substituted with a charged amino acid, optionally, Asp or Glu; and (l) Thr at position 29 substituted with Gly or a charged amino acid, optionally, Asp or Glu.

[0814] With regard to the analogs which exhibit agonist activity at the GIP receptor, the analog comprises an extension of 1-21 amino acids (e.g., 5-19, 7-15, 9-12 amino acids). The extension of the analog may comprise any amino acid sequence, provided that the extension is 1 to 21 amino acids. In some aspects, the extension is 7 to 15 amino acids and in other aspects, the extension is 9 to 12 amino acids. In some embodiments, the extension comprises (i) the amino acid sequence of SEQ ID NO: 26 or 674, (ii) an amino acid sequence which has high sequence identity (e.g., at least 80%, 85%, 90%, 95%, 98%, 99%) with the amino acid sequence of SEQ ID NO: 26 or 674, or (iii) the amino acid sequence of (i) or (ii) with one or more conservative amino acid modifications.

[0815] In some embodiments, at least one of the amino acids of the extension is acylated or alkylated. The amino acid comprising the acyl or alkyl group may be located at any position of extension of the analog. In certain embodiments, the acylated or alkylated amino acid of the extension is located at one of positions 37, 38, 39, 40, 41, or 42 (according to the numbering of SEQ ID NO: 1) of the analog. In certain embodiments, the acylated or alkylated amino acid is located at position 40 of the analog.

[0816] In exemplary embodiments, the acyl or alkyl group is an acyl or alkyl group which is non-native to a naturally-occurring amino acid. For example, the acyl or alkyl group may be a C4 to C30 (e.g., C12 to C18) fatty acyl group or C4 to C30 (e.g., C12 to C18) alkyl. The acyl or alkyl group may be any of those discussed herein.

[0817] In some embodiments, the acyl or alkyl group is attached directly to the amino acid, e.g., via the side chain of the amino acid. In other embodiments, the acyl or alkyl group is attached to the amino acid via a spacer (e.g., an amino acid, a dipeptide, a tripeptide, a hydrophilic bifunctional spacer, a hydrophobic bifunctional spacer). In certain aspects, the spacer is 3 to 10 atoms in length. In some embodiments, the amino acid spacer is not γ-Glu. In some embodiments, the dipeptide spacer is not γ-Glu-γ-Glu.

[0818] Also, in exemplary embodiments, the amino acid to which the acyl or alkyl group is attached may be any of those described herein, including, for example, an amino acid of Formula I, II, or III. The amino acid which is acylated or alkylated may be a Lys, for example. Suitable amino acids comprising an acyl or alkyl group, as well as suitable acyl groups and alkyl groups, are described herein. See, for example, the teachings under the sections entitled Acylation and Alkylation.

[0819] In other embodiments, 1-6 amino acids (e.g., 1-2, 1-3, 1-4, 1-5 amino acids) of the extension are positive-charged amino acids, e.g., amino acids of Formula IV, such as, for example, Lys. As used herein, the term “positive-charged amino acid” refers to any amino acid, naturally-occurring or non-naturally occurring, comprising a positive charge on an atom of its side chain at a physiological pH. In certain aspects, the positive-charged amino acids are located at any of positions 37, 38, 39, 40, 41, 42, and 43. In specific embodiments, a positive-charged amino acid is located at position 40.

[0820] In other instances, the extension is acylated or alkylated as described herein and comprises 1-6 positive charged amino acids as described herein.

[0821] In yet other embodiments, the analogs which exhibit agonist activity at the GIP receptor comprises (i) SEQ ID NO: 1 with at least one amino acid modification, (ii) an extension of 1 to 21 amino acids (e.g., 5 to 18, 7 to 15, 9 to 12 amino acids) C-terminal to the amino acid at position 29 of the analog, and (iii) an amino acid comprising an acyl or alkyl group which is non-native to a naturally-occurring amino acid which is located outside of the C-terminal extension (e.g., at any of positions 1-29). In some embodiments, the analog comprises an acylated or alkylated amino acid at position 10. In particular aspects, the acyl or alkyl group is a C4 to C30 fatty acyl or C4 to C30 alkyl group. In some embodiments, the acyl or alkyl group is attached via a spacer, e.g., an amino acid, dipeptide, tripeptide, hydrophilic bifunctional spacer, hydrophobic bifunctional spacer). In certain aspects, the analog comprises an amino acid modification which stabilizes the alpha helix, such as a salt bridge between a Glu at position 16 and a Lys at position 20, or an alpha, alpha-disubstituted amino acid at any one, two, three, or more of positions 16, 20, 21, and 24. In specific aspects, the analog additionally comprises amino acid modifications which confer DPP-IV protease resistance, e.g., DMIA at position 1, Aib at position 2. Analogs comprising further amino acid modifications are contemplated herein.

[0822] In certain embodiments, the analogs having GIP receptor activity exhibit at least 0.1% (e.g., at least 0.5%, 1%, 2%, 5%, 10%, 15%, or 20%) activity of native GIP at the GIP receptor. In some embodiments, the analogs exhibit more than 20% (e.g., more than 50%, more than 75%, more than 100%, more than 200%, more than 300%, more than 500%) activity of native GIP at the GIP receptor. In some embodiments, the analog exhibits appreciable agonist activity at one or both of the GLP-1 and glucagon receptors. In some aspects, the selectivity for these receptors (GIP receptor and GLP-1 receptor and/or glucagon receptor) are within 1000-fold. For example, the selectivity for the GLP-1 receptor of the analogs having GIP receptor activity can be less than 500-fold, 100-fold, within 50-fold, within 25 fold, within 15 fold, within 10 fold) the selectivity for the GIP receptor and/or the glucagon receptor.

[0823] In accordance with some embodiments, the Class 3 glucagon related peptide comprises the amino acid sequence of native glucagon (SEQ ID NO: 1) comprising the following modifications: Aib at position 2, Glu at position 3, Lys at position 10, Glu at position 16, Gln at position 17, Ala at position 18, Lys at position 20, Glu at position 21, Ile at position 23, Ala at position 24; wherein Lys at position 10 is acylated with a C14 or C16 fatty acid, and wherein the C-terminal carboxylate is replaced with an amide. In a specific embodiment, this Class 3 glucagon related peptide is attached via a linker (L) to a GPCR ligand (Y).

[0824] In accordance with some embodiments, the Class 3 glucagon related peptide comprises, consists essentially of, or consists of an amino acid sequence of any of SEQ ID NOs: 70-514, 517-534, or 554, optionally with up to 1, 2, 3, 4, or 5 further modifications that retain GLP-1 agonist and/or glucagon agonist activity. In certain embodiments, the Class 3 glucagon related peptide comprises the amino acids of any of SEQ ID NOs: 562-760. In some embodiments, the Class 3 glucagon related peptide comprises the amino acid sequences of any of SEQ ID NOs: 1301-1421.

### Class 4 Glucagon Related Peptides

[0825] In certain embodiments, Q is a Class 4 glucagon related peptide (see, e.g., International (PCT) Patent Application Publication No. WO 2009/058662, incorporated herein by reference in its entirety.

[0826] All biological sequences referenced in the following section (SEQ ID NOs: 1301-1371) correspond to SEQ ID NOs: 1-71 in WO 2009/058662.

### Activity

[0827] In accordance with some embodiments, Class 4 glucagon related peptides are provided (hereafter referred to as “Class 4 peptides”). In certain aspects a Class 4 peptide is provided which has glucagon antagonist activity. A glucagon antagonists would be used in any setting where the suppression of glucagon agonism is desired. The most immediate and obvious use would be in the treatment of diabetes where glucagon antagonism has been demonstrated in pre-clinical models of hyperglycemia to yield a lowering of blood glucose. Glucagon antagonists can be further modified to improve the biophysical stability and/or aqueous solubility of the compounds while maintaining the antagonist activity of the parent compound. In certain aspects a Class 4 peptide is defined as a pure glucagon antagonist.

[0828] The term “glucagon antagonist” refers to a compound that counteracts glucagon activity or prevents glucagon function. For example, a glucagon antagonist exhibits at least 60% inhibition (e.g., at least 70% inhibition) and preferably, at least 80% inhibition, of the maximum response achieved by glucagon at the glucagon receptor. In some embodiments, the glucagon antagonist exhibits at least 90% inhibition of the maximum response achieved by glucagon at the glucagon receptor. In a specific embodiment, the glucagon antagonist exhibits 100% inhibition of the maximum response achieved by glucagon at the glucagon receptor. Additionally, a glucagon antagonist at a concentration of about 1 μM exhibits less than about 20% of the maximum agonist activity achieved by glucagon at the glucagon receptor. In some embodiments, the glucagon antagonist exhibits less than about 10% of the maximum agonist activity achieved by glucagon at the glucagon receptor. In a specific embodiment, the glucagon antagonist exhibits less than about 5% of the maximum agonist activity achieved by glucagon at the glucagon receptor. In yet another specific embodiment, the glucagon antagonist exhibits 0% of the maximum agonist activity achieved by glucagon at the glucagon receptor.

[0829] A “pure glucagon antagonist” is a glucagon antagonist that does not produce any detected stimulation of glucagon or GLP-1 receptor activity, as measured by cAMP production using a validated in vitro model assay (see, e.g., WO 2009/058662). For example, a pure glucagon antagonist exhibits less than about 5% (e.g., less than about 4%, less than about 3%, less than about 2%, less than about 1%, about 0%) of the maximum agonist activity achieved by glucagon at the glucagon receptor and exhibits less than about 5% (e.g., less than about 4%, less than about 3%, less than about 2%, less than about 1%, and about 0%) of the maximum agonist activity achieved by GLP-1 at the GLP-1 receptor.

[0830] Accordingly, in some aspects, there is provided Class 4 peptides that exhibit pure glucagon antagonist activity. In accordance with some embodiments the glucagon antagonist exhibits activity that reduces glucagon receptor glucagon-induced cAMP production by a maximum of at least 50% when the glucagon receptor is contacted simultaneously with 0.8 nM of glucagon and the glucagon antagonist, as measured by cAMP production in an in vitro assay. In some embodiments, the glucagon antagonist reduces glucagon receptor glucagon-induced cAMP production by a maximum amount of at least 80%.

[0831] Class 4 peptides are believed to be suitable for any use that has previously been described for glucagon antagonists. Accordingly, the Class 4 peptides described herein can be used to treat hyperglycemia, or treat other metabolic diseases that result from high blood levels of glucagon or high blood glucose levels. In accordance with some embodiments the patient to be treated using the Class 4 peptides disclosed herein is a domesticated animal, and in another embodiment the patient to be treated is a human. Studies suggest that lack of glucagon suppression in diabetic patients contributes to postprandial hyperglycemia in part via accelerated glycogenolysis. Analysis of blood glucose during an Oral Glucose Tolerance Test (OGTT), and in the presence or absence of somatostatin-induced glucagon suppression, has shown a significant increase in glucose in subjects with higher glucagon levels. Accordingly, the Class 4 peptides of the present invention can be used to treat hyperglycemia, and are expected to be useful for treating a variety of types of diabetes including diabetes mellitus type I, diabetes mellitus type II, or gestational diabetes, either insulin-dependent or non-insulin-dependent, and reducing complications of diabetes including nephropathy, retinopathy and vascular disease.

[0832] In some embodiments the terminal ten amino acids of Exendin-4 (i.e. the sequence of SEQ ID NO: 1319 (GPSSGAPPPS)) are linked to the carboxy terminus of a Class 4 peptide. These fusion proteins are anticipated to have pharmacological activity for suppressing appetite and inducing weight loss/weight maintenance. In accordance with some embodiments the Class 4 peptides disclosed herein can be further modified to include the amino acid sequence of SEQ ID NO: 1319 (GPSSGAPPPS) linked to amino acid 24 of the Class 4 peptide of SEQ ID NO: 1342 and administered to individuals to induce weight loss or assist in weight maintenance. More particularly, the Class 4 peptide comprises a sequence selected from the group consisting of SEQ ID NO: 1302, SEQ ID NO: 1303, SEQ ID NO: 1304 SEQ ID NO: 1305, SEQ ID NO: 1306, SEQ ID NO: 1307, SEQ ID NO: 1308, SEQ ID NO: 1336, SEQ ID NO: 1339, SEQ ID NO: 1340 SEQ ID NO: 1341, SEQ ID NO: 1342, SEQ ID NO: 1343 and SEQ ID NO: 1344 and further comprising the amino acid sequence of SEQ ID NO: 1319 (GPSSGAPPPS) linked to amino acid 24 of the Class 4 peptide is used to suppress appetite and inducing weight loss/weight maintenance. In some embodiments the administered Class 4 peptide comprises the sequence of SEQ ID NO: 1346 or SEQ ID NO: 1347.

[0833] Such methods for reducing appetite or promoting loss of body weight are expected to be useful in reducing body weight, preventing weight gain, or treating obesity of various causes, including drug-induced obesity, and reducing complications associated with obesity including vascular disease (coronary artery disease, stroke, peripheral vascular disease, ischemia reperfusion, etc.), hypertension, onset of diabetes type II, hyperlipidemia and musculoskeletal diseases.

[0834] The Class 4 peptides of the invention may be administered alone or in combination with other anti-diabetic or anti-obesity agents. Anti-diabetic agents known in the art or under investigation include insulin, sulfonylureas, such as tolbutamide (Orinase), acetohexamide (Dymelor), tolazamide (Tolinase), chlorpropamide (Diabinese), glipizide (Glucotrol), glyburide (Diabeta, Micronase, Glynase), glimepiride (Amaryl), or gliclazide (Diamicron); meglitinides, such as repaglinide (Prandin) or nateglinide (Starlix); biguanides such as metformin (Glucophage) or phenformin; thiazolidinediones such as rosiglitazone (Avandia), pioglitazone (Actos), or troglitazone (Rezulin), or other PPARy inhibitors; alpha glucosidase inhibitors that inhibit carbohydrate digestion, such as miglitol (Glyset), acarbose (Precose/Glucobay); exenatide (Byetta) or pramlintide; Dipeptidyl peptidase-4 (DPP-4) inhibitors such as vildagliptin or sitagliptin; SGLT (sodium-dependent glucose transporter 1) inhibitors; or FBPase (fructose 1,6-bisphosphatase) inhibitors.

[0835] Anti-obesity agents known in the art or under investigation include appetite suppressants, including phenethylamine type stimulants, phentermine (optionally with fenfluramine or dexfenfluramine), diethylpropion (Tenuate®), phendimetrazine (Prelu-2®, Bontril®), benzphetamine (Didrex®), sibutramine (Meridia®, Reductil®); rimonabant (Acomplia®), other cannabinoid receptor antagonists; oxyntomodulin; fluoxetine hydrochloride (Prozac); Qnexa (topiramate and phentermine), Excalia (bupropion and zonisamide) or Contrave (bupropion and naltrexone); or lipase inhibitors, similar to xenical (Orlistat) or Cetilistat (also known as ATL-962), or GT 389-255.

[0836] The Class 4 peptides of the present invention can also be administered to patients suffering from catabolic wasting. It is estimated that over half of cancer patients experience catabolic wasting which is characterized by unintended and progressive weight loss, weakness, and low body fat and muscle. The syndrome is equally common in AIDS patients and can also be present in bacterial and parasitic diseases, rheumatoid arthritis, and chronic diseases of the bowel, liver, lungs, and heart. It is usually associated with anorexia and can manifest as a condition in aging or as a result of physical trauma. Catabolic wasting is a symptom that diminishes the quality of life, worsens the underlying condition, and is a major cause of death. Applicants anticipate that the Class 4 peptides disclosed herein can be administered to patients to treat catabolic wasting.

[0837] Pharmaceutical compositions comprising the Class 4 peptides disclosed herein can be formulated and administered to patients to using standard pharmaceutically acceptable carriers and routes of administration known to those skilled in the art. Accordingly the present disclosure also encompasses pharmaceutical compositions comprising one or more of the Class 4 peptides disclosed herein in combination with a pharmaceutically acceptable carrier. The pharmaceutical compositions may comprise the Class 4 peptides as the sole pharmaceutically active component, or the Class 4 peptides can be combined with one or more additional active agents. In accordance with some embodiments a composition is provided comprising a Class 4 peptide of the present invention and a compound that activates the GLP-1 receptor (such as GLP-1, a GLP-1 analog, an exendin-4 analog, or derivatives thereof). In accordance with some embodiments a composition is provided comprising a Class 4 peptide of the present invention and insulin or an insulin analog. Alternatively, a composition provided for inducing weight loss or preventing weight gain can be provided that comprises the sequence of SEQ ID NO: 1342 further comprising the amino acid sequence of SEQ ID NO: 1319 (GPSSGAPPPS) linked to amino acid 24 of SEQ ID NO: 1342, and an anti-obesity peptide. Suitable anti-obesity peptides include those disclosed in U.S. Pat. Nos. 5,691,309, 6,436,435 or US Patent application 20050176643, and including, but not limited to GLP-1, GIP (Gastric Inhibitory Polypeptide), MP1, PYY, MC-4, Leptin.

### Class 4 Peptide Structure

[0838] In some embodiments Class 4 glucagon related peptides are provided wherein the normally occurring aspartic acid at position nine (of glucagon, SEQ ID NO: 1301) has been substituted with glutamic acid or a cysteic acid-based derivative. More particularly, deletion of the first amino acid (des-His) and substitution of the aspartic acid at position 9 with glutamic acid, in some aspects, produces a Class 4 peptide. Class 4 glucagon related peptides having sulfonic acid substituents substituted at amino acid position nine of glucagon perform similarly to the carboxylic acid-based amino acids but with a few critical differences in relation to physical properties such as solubility. Homocysteic acid (hCysSO3) when substituted for the isosteric glutamic acid at position nine in the conventional des-His, Glu9 Class 4 peptide retains a partial antagonist and weak agonist.

[0839] In some embodiments there is provided a Class 4 peptide wherein the first two to five amino acids are removed, and position 9 (according to the numbering of SEQ ID NO: 1301) is replaced with hCys(SO3), homoglutamic acid, β-homoglutamic acid, or an alkylcarboxylate derivative of cysteine having the structure of:

[chemical structure]

wherein X5 is C1-C4 alkyl, C2-C4 alkenyl, or C2-C4 alkynyl, provides a compound that performs as a hormonal antagonist that is highly specific, potent and without contaminating agonist properties.

[0840] In accordance with some embodiments a Class 4 peptide is provided that comprises a glucagon peptide modified, relative to the wild type sequence of SEQ ID NO: 1301, by the deletion of two to five amino acid residues from the N-terminus and substitution of the aspartic acid residue at position nine of the native protein with a glutamic acid, homoglutamic acid, β-homoglutamic acid, a sulfonic acid derivative of cysteine, or an alkylcarboxylate derivative of cysteine having the structure of:

[chemical structure]

wherein X₅ is C1-C4 alkyl, C2-C4 alkenyl, or C2-C4 alkynyl.

[0841] In one specific embodiment, the Class 4 peptide comprising the deletion of two to five amino acid residues from the N-terminus and substitution of the Asp at position 9 of the native glucagon, is further modified by up to three amino acid modifications. For example, the Class 4 peptide may comprise one, two, or three conservative amino acid modifications. Alternatively or additionally, the Class 4 peptide may comprise one or more amino acid modifications selected from the group consisting of:

[0842] A. substitution of one or two amino acids at positions 10, 20, and 24, (according to the amino acid numbering of SEQ ID NO: 1301), or the N- or C-terminal amino acid of the Class 4 peptide with an amino acid covalently attached to an acyl group or alkyl group via an ester, ether, thioether, amide, or alkyl amine linkage;

[0843] B. substitution of one or two amino acids at positions 16, 17, 20, 21, and 24 (according to the amino acid numbering of SEQ ID NO: 1301), or the N- or C-terminal amino acid of the Class 4 peptide with an amino acid selected from the group consisting of: Cys, Lys, ornithine, homocysteine, and acetyl-phenylalanine (Ac-Phe), wherein the amino acid of the group is covalently bonded to a hydrophilic moiety;

[0844] C. addition of an amino acid covalently bonded to a hydrophilic moiety to the N- or C-terminus of the Class 4 peptide;

[0845] D. substitution of Asp at position 15 (according to the numbering of SEQ ID NO: 1301) with cysteic acid, glutamic acid, homoglutamic acid, and homocysteic acid;

[0846] E. substitution of Ser at position 16 (according to the numbering of SEQ ID NO: 1301) with cysteic acid, glutamic acid, homoglutamic acid, and homocysteic acid;

[0847] F. substitution with Aib at one or more of positions 16, 20, 21, and 24 according to the amino acid numbering of SEQ ID NO: 1301;

[0848] G. deletion of the amino acid at position 29 or the amino acids at positions 28 and 29, according to the numbering of SEQ ID NO: 1301;

[0849] H. substitution of each or both of the Asn at position 28 and the Thr at position 29 (according to the amino acid numbering of SEQ ID NO: 1301) with charged amino acids; and/or addition of one to two charged amino acids at the C-terminus of SEQ ID NO: 1301;

[0850] I. substitution of the Met at position 27 (according to the numbering of SEQ ID NO: 1301) with Leu or norleucine;

[0851] J. addition of a peptide having the amino acid sequence of any of SEQ ID NOs: 19-21 and 53 to the C-terminus of SEQ ID NO: 1301; wherein Thr at position 29 (according to the numbering of SEQ ID NO: 1301) is Thr or Gly; and

[0852] K. replacement of the C-terminal carboxylate with an amide or ester.

[0853] In a specific embodiment, the Class 4 peptide comprises an amino acid modification of A, B, or C, as described above, or a combination thereof. In yet another specific embodiment, the Class 4 peptide further comprises an amino acid modification of any of D to K as described above, or a combination thereof, in addition to the amino acid modification(s) of A, B, and/or C.

[0854] In some embodiments the Class 4 peptide comprises a glucagon peptide, wherein the first 5 amino acids have been removed from the N-terminus, and the remaining N-terminal amino group has been replaced with a hydroxyl group (the “PLA6 analog”), producing the peptide of SEQ ID NO: 1339. Applicants have found that substitution of phenyl-lactic acid for phenylalanine in Class 4 peptide analogs that have the first five amino acids deleted and substitution of a glutamic acid at position 9 (relative to native glucagon) further enhances the potency of those Class 4 peptide analogs.

[0855] In some embodiments the Class 4 peptide peptide of SEQ ID NO: 1339 is further modified by substituting the aspartic acid residue at position four (position 9 of the native glucagon) with an amino acid of the general structure:

[chemical structure]

wherein X₆ is C1-C3 alkyl, C2-C3 alkene or C2-C3 alkynyl, and in some embodiments X6 is C1-C3 alkyl, and in another embodiment X6 is C2 alkyl. In some embodiments the Class 4 peptide comprises a glucagon peptide, wherein the first 5 amino acids have been removed from the N-terminus, and the aspartic acid residue at position four (position 9 of the native glucagon) has been substituted with cysteic acid or homocysteic acid. In some embodiments the Class 4 peptide comprises a glucagon peptide comprising an amino acid sequence selected from the group consisting of SEQ ID NO: 1339, SEQ ID NO: 1307 and SEQ ID NO: 1308. In some embodiments the Class 4 peptide comprises an amino acid sequence selected from the group consisting of SEQ ID NO: 1308, wherein the amino acid at position four is homocysteic acid.

[0856] In another embodiment, the Class 4 peptide of SEQ ID NO: 1339 is further modified by substituting the aspartic acid residue at position four (position 9 of the native glucagon) with glutamic acid, homoglutamic acid, β-homoglutamic acid, or an alkylcarboxylate derivative of cysteine having the structure of:

[chemical structure]

wherein X₅ is C1-C4 alkyl, C2-C4 alkenyl, or C2-C4 alkynyl. In a specific embodiment, X₅ is C1 or C2 alkyl.

[0857] However, applicants have discovered that with the substitution of the N-terminal phenylalanine with PLA in a des1-5 glucagon analog (i.e., a glucagon analog having the first five amino acids deleted), further substitution of the native aspartic acid residue at position four (position 9 of the native glucagon) is not required to produce an analog that exhibits pure antagonism. This result is surprising in light of the prior art teachings that the native aspartic acid residue at position four must substituted to produce high affinity and potent antagonists of glucagon (2-29) analogs. The use of the PLA substitution improves the relative potency of the Asp9 analog to a point comparable to that of the Glu9 and hCys(SO₃H)9 analogs.

[0858] Substitution of the phenylalanine residue with other phenylalanine analogs, including 3, 4-2F-phenylalnine (3, 4-2F-Phe), 2-naphthyalanine (2-Nal), N-acyl-phenylalanine (Ac-Phe), alpha-methylhydrocinnamic acid (MCA) and benzylmalonic acid (BMA) did not perform as potently as the PLA substitution.

[0859] Substituting PLA at sites other than at position six (according to the amino acid numbering of native glucagon), including at positions 4 and 5 reveals that the PLA6 analog is an appreciably more potent antagonist than glucagon analogs having a slightly extended N-terminus. The present invention also includes analogs wherein the N-terminal amino group is substituted with an acylated and alkylated “O-terminal” peptides.

[0860] Furthermore, the PLA6 substitution not only increases the potency of the antagonist but also serves a critical role in pegylation. The PLA6 analogs can be selectively pegylated without restoration of glucagon agonism. In the absence of the PLA substitution, pegylation of the analog surprisingly induces glucagon agonism. This glucagon agonism is not seen in the pegylated PLA6 analogs. Several sites for pegylation were investigated including positions 3, 6 and 19 (positions 8, 11 and 19 of native glucagon) and at the N-terminal amino acid residue. In some embodiments the pegylation is at position 19 (position 24 of native glucagon) as that site exhibits the most potent and selective glucagon antagonism.

[0861] In some embodiments, the Class 4 peptide comprises the general structure of A-B-C, wherein A is selected from the group consisting of:

[0862] (i) phenyl lactic acid (PLA);

[0863] (ii) an oxy derivative of PLA;

[0864] (iii) a peptide of 2 to 6 amino acids in which two consecutive amino acids of the peptide are linked via an ester or ether bond;

B represents amino acids i to 26 of SEQ ID NO: 1301, wherein i is 3, 4, 5, 6, or 7, optionally comprising one or more amino acid modifications selected from the group consisting of:

[0865] (iv) Asp at position 9 (according to the amino acid numbering of SEQ ID NO: 1301) is substituted with a Glu, a sulfonic acid derivative of Cys, homoglutamic acid, β-homoglutamic acid, or an alkylcarboxylate derivative of cysteine having the structure of:

[chemical structure]

[0866] wherein X5 is C₁-C₄ alkyl, C₂-C₄ alkenyl, or C₂-C₄ alkynyl.

[0867] (v) substitution of one or two amino acids at positions 10, 20, and 24, (according to the amino acid numbering of SEQ ID NO: 1301) with an amino acid covalently attached to an acyl or alkyl group via an ester, ether, thioether, amide, or alkyl amine linkage;

[0868] (vi) substitution of one or two amino acids at positions 16, 17, 20, 21, and 24 (according to the amino acid numbering of SEQ ID NO: 1301) with an amino acid selected from the group consisting of: Cys, Lys, ornithine, homocysteine, and acetyl-phenylalanine (Ac-Phe), wherein the amino acid of the group is covalently attached to a hydrophilic moiety;

[0869] (vii) Asp at position 15 (according to the numbering of SEQ ID NO: 1301) is substituted with cysteic acid, glutamic acid, homoglutamic acid, and homocysteic acid;

[0870] (viii) Ser at position 16 (according to the numbering of SEQ ID NO: 1301) is substituted with cysteic acid, glutamic acid, homoglutamic acid, and homocysteic acid;

[0871] (ix) substitution with Aib at one or more of positions 16, 20, 21, and 24 according to the amino acid numbering of SEQ ID NO: 1301;

and C is selected from the group consisting of:

[0872] (x) X;

[0873] (xi) X-Y;

[0874] (xii) X-Y-Z; and

[0875] (xiii) X-Y-Z-R10,

[0876] wherein X is Met, Leu, or Nle; Y is Asn or a charged amino acid; Z is Thr, Gly, Cys, Lys, ornithine (Orn), homocysteine, acetyl phenylalanine (Ac-Phe), or a charged amino acid; wherein R10 is selected from a group consisting of SEQ ID NOs: 1319-1321 and 1353; and

[0877] (xiv) any of (x) to (xiii) in which the C-terminal carboxylate is replaced with an amide.

[0878] In a specific aspect, the Class 4 peptide comprises an oxy derivative of PLA. As used herein “oxy derivative of PLA” refers to a compound comprising a modified structure of PLA in which the hydroxyl group has been replaced with O—R₁₁, wherein R₁₁ is a chemical moiety. In this regard, the oxy derivative of PLA can be, for example, an ester of PLA or an ether of PLA.

[0879] Methods of making oxy derivatives of PLA are known in the art. For example, when the oxy derivative is an ester of PLA, the ester may be formed by upon reaction of the hydroxyl of PLA with a carbonyl bearing a nucleophile. The nucleophile can be any suitable nucleophile, including, but not limited to an amine or hydroxyl. Accordingly, the ester of PLA can comprise the structure of Formula IV:

[chemical structure]

wherein R₇ is an ester formed upon reaction of the hydroxyl of PLA with a carbonyl bearing a nucleophile.

[0880] The carbonyl bearing a nucleophile (which reacts with the hydroxyl of PLA to form an ester) can be, for example, a carboxylic acid, a carboxylic acid derivative, or an activated ester of a carboxylic acid. The carboxylic acid derivative can be, but is not limited to, an acyl chloride, an acid anhydride, an amide, an ester, or a nitrile. The activated ester of a carboxylic acid can be, for example, N-hydroxysuccinimide (NHS), tosylate (Tos), a carbodiimide, or a hexafluorophosphate. In some embodiments, the carbodiimide is 1,3-dicyclohexylcarbodiimide (DCC), 1,1′-carbonyldiimidazole (CDI), 1-ethyl-3-(3-dimethylaminopropyl)carbodiimide hydrochloride (EDC), or 1,3-diisopropylcarbodiimide (DICD). In some embodiments, the hexafluorophosphate is selected from a group consisting of hexafluorophosphate benzotriazol-1-yl-oxy-tris(dimethylamino)phosphonium hexafluorophosphate (BOP), benzotriazol-1-yl-oxytripyrrolidinophosphonium hexafluorophosphate (PyBOP), 2-(1H-7-azabenzotriazol-1-yl)-1,1,3,3-tetramethyl uronium hexafluorophosphate (HATU), and o-benzotriazole-N,N,N′,N′-tetramethyl-uronium-hexafluoro-phosphate (HBTU).

[0881] Methods of making ethers from reaction with a hydroxyl group (e.g., the hydroxyl of PLA) also are known in the art. For example, the hydroxyl group of PLA may be reacted with a halogenated alkyl or tosylated alkyl alcohol to form an ether bond.

[0882] Generally, the chemical moiety of R₁₁ is one which does not decrease the activity of the Class 4 peptide. In some embodiments, the chemical moiety enhances the activity, stability, and/or solubility of the Class 4 peptide.

[0883] In a specific embodiment, the chemical moiety bound to PLA via an oxygen-containing bond (e.g., via an ester or ether bond) is a polymer (e.g., a polyalkylene glycol), a carbohydrate, an amino acid, a peptide, or a lipid, e.g., a fatty acid or a steroid.

[0884] In a specific embodiment, the chemical moiety is an amino acid, which, optionally, is a part of a peptide, such that Formula IV is a depsipeptide. In this regard, PLA may be at a position other than the N-terminal amino acid residue of the Class 4 peptide, such that the Class 4 peptide comprises one or more (e.g., 1, 2, 3, 4, 5, 6, or more) amino acids N-terminal to the PLA residue. For example, the Class 4 peptide can comprise PLA at position n, wherein n is 2, 3, 4, 5, or 6 of the Class 4 peptide.

[0885] The amino acids N-terminal to the PLA residue may be synthetic or naturally-occurring. In a specific embodiment, the amino acids which are N-terminal PLA are naturally-occurring amino acids. In some embodiments, the amino acids which are N-terminal to PLA are the N-terminal amino acids of native glucagon. For example, the Class 4 peptide can comprise at the N-terminus the amino acid sequence of any of SEQ ID NOs: 1354-1358, wherein PLA is linked to threonine via an ester bond:

SEQ ID NO: 1354
His-Ser-Gln-Gly-Thr-PLA
SEQ ID NO: 1355
Ser-Gln-Gly-Thr-PLA
SEQ ID NO: 1356
Gln-Gly-Thr-PLA
SEQ ID NO: 1357
Gly-Thr-PLA
SEQ ID NO: 1358
Thr-PLA

[0886] In an alternative embodiment, one or more of the N-terminal amino acids may be substituted with an amino acid other than the amino acid of native glucagon. For example, when the Class 4 peptide comprises PLA as the amino acid at position 5 or 6, the amino acid at position 1 and/or position 2 may be an amino acid which reduces susceptibility to cleavage by dipeptidyl peptidase IV. More particularly, in some embodiments, position 1 of the Class 4 peptide is an amino acid selected from the group consisting of D-histidine, alpha, alpha-dimethyl imidiazole acetic acid (DMIA), N-methyl histidine, alpha-methyl histidine, imidazole acetic acid, desaminohistidine, hydroxyl-histidine, acetyl-histidine and homo-histidine. More particularly, in some embodiments, position 2 of the antagonist peptide is an amino acid selected from the group consisting of D-serine, D-alanine, valine, glycine, N-methyl serine, N-methyl alanine, and aminoisobutyric acid (Aib). Also, for example, when the Class 4 peptide comprises PLA as the amino acid at position 4, 5, or 6, the amino acid at position 3 of the Class 4 peptide may be glutamic acid, as opposed to the native glutamine residue of native glucagon. In an exemplary embodiment of the invention, the Class 4 peptide comprises at the N-terminus the amino acid sequence of any of SEQ ID NOs: 1359-1361.

[0887] With respect to the Class 4 peptides comprising a compound of Formula IV, the polymer may be any polymer, provided that it can react with the hydroxyl group of PLA. The polymer may be one that naturally or normally comprises a carbonyl bearing a nucleophile. Alternatively, the polymer may be one which was derivatized to comprise the carbonyl bearing the carbonyl. The polymer may be a derivatized polymer of any of: polyamides, polycarbonates, polyalkylenes and derivatives thereof including, polyalkylene glycols, polyalkylene oxides, polyalkylene terepthalates, polymers of acrylic and methacrylic esters, including poly(methyl methacrylate), poly(ethyl methacrylate), poly(butylmethacrylate), poly(isobutyl methacrylate), poly(hexylmethacrylate), poly(isodecyl methacrylate), poly(lauryl methacrylate), poly(phenyl methacrylate), poly(methyl acrylate), poly(isopropyl acrylate), poly(isobutyl acrylate), and poly(octadecyl acrylate), polyvinyl polymers including polyvinyl alcohols, polyvinyl ethers, polyvinyl esters, polyvinyl halides, poly(vinyl acetate), and polyvinylpyrrolidone, polyglycolides, polysiloxanes, polyurethanes and co-polymers thereof, celluloses including alkyl cellulose, hydroxyalkyl celluloses, cellulose ethers, cellulose esters, nitro celluloses, methyl cellulose, ethyl cellulose, hydroxypropyl cellulose, hydroxy-propyl methyl cellulose, hydroxybutyl methyl cellulose, cellulose acetate, cellulose propionate, cellulose acetate butyrate, cellulose acetate phthalate, carboxylethyl cellulose, cellulose triacetate, and cellulose sulphate sodium salt, polypropylene, polyethylenes including poly(ethylene glycol), poly(ethylene oxide), and poly(ethylene terephthalate), and polystyrene.

[0888] The polymer can be a biodegradable polymer, including a synthetic biodegradable polymer (e.g., polymers of lactic acid and glycolic acid, polyanhydrides, poly(ortho)esters, polyurethanes, poly(butic acid), poly(valeric acid), and poly(lactide-cocaprolactone)), and a natural biodegradable polymer (e.g., alginate and other polysaccharides including dextran and cellulose, collagen, chemical derivatives thereof (substitutions, additions of chemical groups, for example, alkyl, alkylene, hydroxylations, oxidations, and other modifications routinely made by those skilled in the art), albumin and other hydrophilic proteins (e.g., zein and other prolamines and hydrophobic proteins)), as well as any copolymer or mixture thereof. In general, these materials degrade either by enzymatic hydrolysis or exposure to water in vivo, by surface or bulk erosion.

[0889] The polymer can be a bioadhesive polymer, such as a bioerodible hydrogel described by H. S. Sawhney, C. P. Pathak and J. A. Hubbell in Macromolecules, 1993, 26, 581-587, the teachings of which are incorporated herein, polyhyaluronic acids, casein, gelatin, glutin, polyanhydrides, polyacrylic acid, alginate, chitosan, poly(methyl methacrylates), poly(ethyl methacrylates), poly(butylmethacrylate), poly(isobutyl methacrylate), poly(hexylmethacrylate), poly(isodecyl methacrylate), poly(lauryl methacrylate), poly(phenyl methacrylate), poly(methyl acrylate), poly(isopropyl acrylate), poly(isobutyl acrylate), and poly(octadecyl acrylate).

[0890] In some embodiments, the polymer is a water-soluble polymer. Suitable water-soluble polymers are known in the art and include, for example, polyvinylpyrrolidone, hydroxypropyl cellulose (HPC; Klucel), hydroxypropyl methylcellulose (HPMC; Methocel), nitrocellulose, hydroxypropyl ethylcellulose, hydroxypropyl butylcellulose, hydroxypropyl pentylcellulose, methyl cellulose, ethylcellulose (Ethocel), hydroxyethyl cellulose, various alkyl celluloses and hydroxyalkyl celluloses, various cellulose ethers, cellulose acetate, carboxymethyl cellulose, sodium carboxymethyl cellulose, calcium carboxymethyl cellulose, vinyl acetate/crotonic acid copolymers, poly-hydroxyalkyl methacrylate, hydroxymethyl methacrylate, methacrylic acid copolymers, polymethacrylic acid, polymethylmethacrylate, maleic anhydride/methyl vinyl ether copolymers, poly vinyl alcohol, sodium and calcium polyacrylic acid, polyacrylic acid, acidic carboxy polymers, carboxypolymethylene, carboxyvinyl polymers, polyoxyethylene polyoxypropylene copolymer, polymethylvinylether co-maleic anhydride, carboxymethylamide, potassium methacrylate divinylbenzene co-polymer, polyoxyethyleneglycols, polyethylene oxide, and derivatives, salts, and combinations thereof.

[0891] In a specific embodiment, the polymer is a polyalkylene glycol, including, for example, polyethylene glycol (PEG).

[0892] The carbohydrate may be any carbohydrate provided that it comprises or is made to comprise a carbonyl with an alpha leaving group. The carbohydrate, for example, may be one which has been derivatized to comprise a carbonyl with an alpha leaving group. In this regard, the carbohydrate may be a derivatized form of a monosaccharide (e.g., glucose, galactose, fructose), a disaccharide (e.g., sucrose, lactose, maltose), an oligosaccharide (e.g., raffinose, stachyose), a polysaccharide (a starch, amylase, amylopectin, cellulose, chitin, callose, laminarin, xylan, mannan, fucoidan, galactomannan.

[0893] With respect to the Class 4 peptides comprising a compound of Formula IV, the lipid may be any lipid comprising a carbonyl with an alpha leaving group. The lipid, for example, may be one which is derivatized to comprise the carbonyl. In this regard, the lipid, may be a derivative of a fatty acid (e.g., a C4-C30 fatty acid, eicosanoid, prostaglandin, leukotriene, thromboxane, N-acyl ethanolamine), glycerolipid (e.g., mono-, di-, tri-substituted glycerols), glycerophospholipid (e.g., phosphatidylcholine, phosphatidylinositol, phosphatidylethanolamine, phosphatidylserine), sphingolipid (e.g., sphingosine, ceramide), sterol lipid (e.g., steroid, cholesterol), prenol lipid, saccharolipid, or a polyketide. In some embodiments, the lipid is a oil, wax, cholesterol, sterol, fat-soluble vitamin, monoglyceride, diglyceride, triglyceride, a phospholipid.

[0894] In some embodiments, R₇ has a molecular weight of about 100 kDa or less, e.g., about 90 kDa or less, about 80 kDa or less, about 70 kDa or less, about 60 kDa or less, about 50 kDa or less, about 40 kDa or less. Accordingly, R7 can have a molecular weight of about 35 kDa or less, about 30 kDa or less, about 25 kDa or less, about 20 kDa or less, about 15 kDa or less, about 10 kDa or less, about 5 kDa or less, or about 1 kDa.

[0895] In an alternative embodiment, the Class 4 peptide comprises as A, a peptide of 2 to 6 amino acids in which two consecutive amino acids of the peptide are linked via an ester or ether bond. The ester or ether bond may be, e.g., between amino acids 2 and 3, 3 and 4, 4 and 5, or 5 and 6. Optionally the peptide may be further modified by covalent linkage to another chemical moiety including linkage to a polymer (e.g. a hydrophilic polymer), alkylation, or acylation.

[0896] With regard to the Class 4 peptide comprising the general structure A-B-C, B represents amino acids of native glucagon, e.g., i to 26 of SEQ ID NO: 1301, wherein i is 3, 4, 5, 6, or 7, optionally comprising one or more amino acid modifications. In a specific embodiment, B represents amino acids 7 to 26 of SEQ ID NO: 1301, optionally further modified.

[0897] In some embodiments, B is modified by up to three amino acid modifications. For example, B, which represents native amino acid sequence of SEQ ID NO: 1301 is modified by one or more conservative amino acid modifications.

[0898] In another embodiment, B comprises one or more amino acid modifications selected from the group consisting of (iv) to (ix), as described herein. In a specific embodiment, B comprises one or both of the amino acid modifications (v) and (vi). In a further specific embodiment, B comprises one or a combination of amino acid modifications selected from the group consisting of (iv), (vii), (viii), and (ix), in addition to (v) and (vi).

[0899] In another specific embodiment, the Class 4 peptide comprises one or more charged amino acids at the C-terminus. For example, Y and/or Z can be a charged amino acid, e.g., Lys, Arg, His, Asp, and Glu. In yet another embodiment, the Class 4 peptide comprises one to two charged amino acids (e.g., Lys, Arg, His, Asp, and Glu) C-terminal to Z. In a specific aspect, Z followed by one to two charged amino acids does not comprise R10.

[0900] The Class 4 peptide in some embodiments comprises a hydrophilic moiety covalently bound to an amino acid residue of the Class 4 peptide, as described herein. For example, the Class 4 peptide can comprise a hydrophilic moiety covalently attached to an amino acid at position 1, 16, 20, 21, or 24 according to the numbering of SEQ ID NO: 1301. In another embodiment, the hydrophilic moiety is attached to the C-terminal amino acid of the Class 4 peptide, which in some cases, is 1 or 11 amino acids C-terminal to Z. In yet another embodiment, the hydrophilic moiety is attached to PLA, when A is PLA, PLA-Phe, or PLA-Thr-Phe, wherein PLA is modified to comprise the hydrophilic moiety. In another embodiment, an amino acid comprising a hydrophilic moiety is added to the N- or C-terminus of the Class 4 peptide. In another embodiment, the Class 4 peptide comprises an acyl group or alkyl group as described herein. For example, the acylation or alkylation can occur off the side chain of the amino acid at position 10, 20, or 24, according to the numbering of SEQ ID NO: 1301. In an alternative embodiment, the acylation or alkylation occurs off the side chain of the C-terminal amino acid of the Class 4 peptide, which in some cases, is 1 or 11 amino acids C-terminal to Z. In yet another embodiment, when A is PLA, PLA-Phe, or PLA-Thr-Phe, the PLA is modified to comprise an acyl or alkyl group.

### Exemplary Embodiments

[0901] The Class 4 peptide may comprise any amino acids, synthetic or naturally occurring, provided that at least two consecutive amino acids of the peptide are linked via an ester or ether bond. In a specific embodiment, the peptide comprises amino acids of native glucagon. For example, the peptide can comprise j to 6 of native glucagon (SEQ ID NO: 1301), wherein j is 1, 2, 3, 4, or 5. Alternatively, the peptide can comprise an amino acid sequence based on the N-terminus of SEQ ID NO: 1301 with one or more amino acid modifications. The amino acid at position 1 and/or position 2 may be an amino acid which reduces susceptibility to cleavage by dipeptidyl peptidase IV. For instance, the peptide can comprise at position 1 of the Class 4 peptide an amino acid selected from the group consisting of D-histidine, alpha, alpha-dimethyl imidiazole acetic acid (DMIA), N-methyl histidine, alpha-methyl histidine, imidazole acetic acid, desaminohistidine, hydroxyl-histidine, acetyl-histidine and homo-histidine. More particularly, in some embodiments, position 2 of the antagonist peptide is an amino acid selected from the group consisting of D-serine, D-alanine, valine, glycine, N-methyl serine, N-methyl alanine, and aminoisobutyric acid (Aib). Also, for example, the amino acid at position 3 of the Class 4 peptide may be glutamic acid, as opposed to the native glutamine residue of native glucagon. Accordingly, the Class 4 peptide can comprise an amino acid sequence of:

(SEQ ID NO: 1368)
Xaa1-Xaa2-Xaa3-Thr-Gly-Phe;
(SEQ ID NO: 1369)
Xaa2-Xaa3-Thr-Gly-Phe;
or
(SEQ ID NO: 1370)
Xaa3-Thr-Gly-Phe;

wherein Xaa1 is selected from a group consisting of: His, D-histidine, alpha, alpha-dimethyl imidiazole acetic acid (DMIA), N-methyl histidine, alpha-methyl histidine, imidazole acetic acid, desaminohistidine, hydroxyl-histidine, acetyl-histidine and homo-histidine; Xaa2 is selected from a group consisting of: Ser, D-serine, D-alanine, valine, glycine, N-methyl serine, N-methyl alanine, and aminoisobutyric acid (Aib); and Xaa3 is Gln or Glu.

[0902] The present invention also encompasses embodiments wherein the C-terminal amino acid of the Class 4 peptides have an amide group substituting for the carboxylic acid group that is present on the native amino acid.

[0903] In some embodiments, wherein the Class 4 peptide is PEGylated, the Class 4 peptide comprises the shortened glucagon peptides, specifically 6-29 where the “N-terminal” amino acid is PLA (phenyl-lactic acid). Such glucagon derivatives exhibit unique virtues. They are more potent peptides than those with the native N-terminal phenylalanine and they suppress any glucagon agonism that results from pegylation, something not seen with the native phenylalanine. Finally, while the current literature establishes that a substitution of the native aspartic acid at position 9 is required for antagonist activity, applicants have discovered the surprising result that such a substitution is no longer required in the PLA6-(6-29) glucagon analogs.

[0904] In some embodiments an amino acid of the Class 4 peptide is substituted with at least one cysteine residue, wherein the side chain of the cysteine residue is further modified with a thiol reactive reagent, including for example, maleimido, vinyl sulfone, 2-pyridylthio, haloalkyl, and haloacyl. These thiol reactive reagents may contain carboxy, keto, hydroxyl, and ether groups as well as other hydrophilic moieties such as polyethylene glycol units. In an alternative embodiment, an amino acid of the Class 4 peptide is substituted with lysine, and the side chain of the substituting lysine residue is further modified using amine reactive reagents such as active esters (succinimido, anhydride, etc) of carboxylic acids or aldehydes of hydrophilic moieties such as polyethylene glycol. In accordance with some embodiments the lysine residue corresponding to position 12 of the native peptide is substituted with arginine and a single lysine substitution is inserted for one of the amino acids corresponding to position 1, 16, 17, 20, 21, 24 or 29 of the native peptide, or a lysine is added to the N- or C-terminus of the Class 4 peptide.

[0905] In another embodiment the methionine residue corresponding to position 27 of the native peptide is changed to leucine or norleucine to prevent oxidative degradation of the peptide.

[0906] In some embodiments, the Class 4 peptides described herein are further modified by truncation or deletion of one or two amino acids of the C-terminus of the glucagon peptide (i.e., truncation of the amino acid at position 29 or at positions 28 and 29 of native glucagon) without affecting activity and/or potency at the glucagon receptor. In this regard, the Class 4 peptide described herein can, for example, consist essentially of or consist of amino acids 1-27, 1-28, 2-27, 2-28, 3-27, 3-28, 4-27, 4-28, 5-27, 5-28, 6-27, or 6-28 of the native glucagon peptide (SEQ ID NO: 1301) with one or more modifications resulting in Class 4 peptidic activity as described herein.

[0907] The presently disclosed Class 4 peptides also encompass amino acid substitutions at positions that are known not to be critical to the function of the glucagon peptide. In some embodiments the substitutions are conservative amino acid substitutions at one, two or three positions selected from the group consisting of 2, 5, 6, 7, 8, 9, 12, 13, 14, 15, 16, 19, 22, 23 or 24 of SEQ ID NO: 1339. In some embodiments the Class 4 peptide comprises a derivative peptide of SEQ ID NO: 1342 wherein the glucagon peptide comprises a further amino acid substitution relative to SEQ ID NO: 1342 at one to three amino acid positions selected from positions 2, 5, 6, 8, 9, 12, 13 and 14. In some embodiments the substitutions at positions 2, 5, 6, 8, 9, 12, 13 and 14 of SEQ ID NO: 1342 are conservative amino acid substitutions. In some embodiments the amino acids corresponding to positions 16, 17, 20, 21, 24 or 29 of the native peptide, and more particularly at position 21 and/or 24 are substituted with cysteine or lysine, wherein a PEG chain is covalently attached to the substituted cysteine or lysine residue.

[0908] In accordance with some embodiments the modified Class 4 peptide comprises two or more polyethylene glycol chains covalently bound to the peptide wherein the total molecular weight of the glucagon chains is about 1,000 to about 5,000 Daltons. In some embodiments the pegylated Class 4 peptide comprises a peptide selected from the group consisting of SEQ ID NO: 1312, and SEQ ID NO: 1322, wherein said peptide comprise a polyethylene glycol chain linked to the amino acid at positions 11 and 19 and the combined molecular weight of the two PEG chains is about 1,000 to about 5,000 Daltons.

[0909] In accordance with some embodiments a Class 4 peptide is provided comprising a modified glucagon peptide selected from the group consisting of:

(SEQ ID NO: 1309)
R₁-Phe-Thr-Ser-Xaa-Tyr-Ser-Xaa-Tyr-Leu-Xaa-Xaa-Arg-Arg-Ala-Gln-Asp-Phe-Val-
Gln-Trp-Leu-Xaa-Asn-Thr-R₂,
(SEQ ID NO: 1310)
R₁-Phe-Thr-Ser-Xaa-Tyr-Ser-Xaa-Tyr-Leu-Asp-Ser-Arg-Arg-Ala-Gln-Xaa-Phe-Val-
Gln-Trp-Leu-Xaa-Asn-Thr-R₂,
(SEQ ID NO: 1311)
R₁-Phe-Thr-Ser-Xaa-Tyr-Ser-Xaa-Tyr-Leu-Asp-Ser-Arg-Arg-Ala-Gln-Asp-Phe-Val-
Xaa-Trp-Leu-Xaa-Asn-Thr-R₂
and
(SEQ ID NO: 1312)
R₁-Phe-Thr-Ser-Xaa-Tyr-Ser-Xaa-Tyr-Leu-Asp-Ser-Arg-Arg-Ala-Gln-Xaa-Phe-Val-
Xaa-Trp-Leu-Xaa-Asn-Thr-R₂,

wherein Xaa at position 4=aspartic acid, glutamic acid, cysteic acid or homocysteic acid, Xaa at position 7=Lys or Arg, Xaa at position 10 is aspartic acid, cysteic acid, glutamic acid, homoglutamic acid and homocysteic acid; Xaa at position 11 is Ser, Lys, Cys, Orn, homocysteine or acetyl phenylalanine, Xaa at position 16 is Asp, Lys, Cys, Orn, homocysteine or acetyl phenylalanine a and Xaa at position 19 is Gln, Lys, Cys, Orn, homocysteine and acetyl phenylalanine, Xaa at position 22=Met, Leu or Nle, R₁ is OH or NH₂, and R₂ is COOH or CONH₂, wherein the peptide is pegylated at position 11 for SEQ ID NO: 1309, at position 16 for SEQ ID NO: 1310, position 19 for SEQ ID NO: 1311 and at positions 16 and 19 of SEQ ID NO: 1312, with the proviso that when Xaa at position 4=aspartic acid then R₁ is OH. In accordance with some embodiments the peptide comprises the sequence of SEQ ID NO: 1309, SEQ ID NO: 1310 or SEQ ID NO: 1311, wherein R₁ is OH and R₂ is CONH₂. In some embodiments the peptide comprises the sequence of SEQ ID NO: 1309, SEQ ID NO: 1310 or SEQ ID NO: 1311, wherein R₁ is OH, R₂ is CONH₂ and the amino acid at position 4 is aspartic acid, and in a further embodiment such peptides comprise a carboxy terminal extension comprising the sequence of SEQ ID NO: 1319.

[0910] In accordance with some embodiments the peptide comprises a sequence selected from the group consisting of SEQ ID NO: 1309, SEQ ID NO: 1310, SEQ ID NO: 1313, SEQ ID NO: 1314, and SEQ ID NO: 1316, wherein the peptide is pegylated at position 11 for SEQ ID NO: 1309 and SEQ ID NO: 1313, pegylated at position 16 for SEQ ID NO: 1310, and pegylated at position 19 for SEQ ID NO: 1310 and SEQ ID NO: 1314. In some embodiments the glucagon agonist comprises the peptide of SEQ ID NO: 1313 or SEQ ID NO: 1314. In some embodiments the C-terminal amino acid of the Class 4 peptides disclosed herein have an amide group in place of the carboxylic acid group that is present on the native amino acid. In accordance with some embodiments the Class 4 peptide comprises the sequence of SEQ ID NO: 1318.

[0911] In accordance with some embodiments, a Class 4 peptide is provided wherein a plasma protein has been covalently linked to an amino acid side chain of the peptide to improve the solubility, stability and/or pharmacokinetics of the glucagon peptide. For example, serum albumin can be covalently bound to the Class 4 peptides presented herein. In some embodiments the plasma protein is covalently bound to an amino acid corresponding to position 16, 17, 20, 21, 24 or 29 of the native glucagon peptide. More particularly, in some embodiments the plasma protein is bound to an amino acid corresponding to position 16 or 24 of the native glucagon peptide, wherein the Class 4 peptide comprises the sequence of SEQ ID NO: 1303, SEQ ID NO: 1304, SEQ ID NO: 1305, SEQ ID NO: 1306, SEQ ID NO: 1307, SEQ ID NO: 1308, SEQ ID NO: 1309, SEQ ID NO: 1311, SEQ ID NO: 1312, SEQ ID NO: 1322, SEQ ID NO: 1323, SEQ ID NO: 1324, SEQ ID NO: 1325, SEQ ID NO: 1326, SEQ ID NO: 1327, SEQ ID NO: 1328, SEQ ID NO: 1336 and SEQ ID NO: 1339. In some embodiments the Class 4 peptide comprises a peptide selected from the group consisting of SEQ ID NO: 1309, SEQ ID NO: 1310, SEQ ID NO: 1311 and SEQ ID NO: 1312.

[0912] In accordance with some embodiments, a Class 4 peptide is provided wherein a linear amino acid sequence representing the Fc portion of an immunoglobin molecule has been covalently linked to an amino acid side chain of a Class 4 peptide disclosed herein to improve the solubility, stability and/or pharmacokinetics of the glucagon peptide. For example, the amino acid sequence representing the Fc portion of an immunoglobin molecule can be covalently bound to position 11, 12, 15, 16, 19, 21 or 24 of the glucagon peptide of SEQ ID NO: 1307, SEQ ID NO: 1339, or a glucagon analog thereof. In some embodiments the Fc peptide is covalently bound to position 11 or 19 of the Class 4 peptide of SEQ ID NO: 1306, SEQ ID NO: 1307, SEQ ID NO: 1308 or SEQ ID NO: 1336. The Fc portion is usually isolated from IgG, but the Fc peptide fragment from any immunoglobin should function equivalently. In some embodiments the glucagon peptide is selected from the group consisting of SEQ ID NO: 1303, SEQ ID NO: 1304, SEQ ID NO: 1305, SEQ ID NO: 1307 SEQ ID NO: 1308, and SEQ ID NO: 1339, wherein the Fc portion is linked to the corresponding position of 16, 17, 20, 21, 24 or 29 of the native glucagon peptide. In some embodiments the Class 4 peptide comprises a glucagon peptide selected from the group consisting of SEQ ID NO: 1309, SEQ ID NO: 1310, SEQ ID NO: 1311 and SEQ ID NO: 1312, wherein the Fc peptide is bound to the side chain of the amino acid located at position 11, 16 or 19 of SEQ ID NO: 1309, SEQ ID NO: 1310, SEQ ID NO: 1311, respectively, and at both positions 11 and 19 for SEQ ID NO: 1312.

[0913] In certain embodiments of the invention, the Class 4 peptide comprises the amino acid sequence of any of SEQ ID NOs: 1362, 1364-1367, and 1371.

### Modifications to Improve Solubility

[0914] The Class 4 peptides can be further modified to improve the peptide's solubility in aqueous solutions at physiological pH, while, in some aspects retaining a glucagon antagonist activity. Introduction of hydrophilic groups at positions corresponding to positions 1, 16, 17, 20, 21, 24 and 29 of the native peptide, or at the C-terminus, can improve the solubility of the resulting Class 4 peptide in solutions having a physiological pH, while retaining the parent compounds antagonist activity. Therefore, in some embodiments the presently disclosed Class 4 peptides are further modified to comprise one or more hydrophilic groups covalently linked to the side chains of amino acids corresponding to amino acid positions 1, 16, 17, 20, 21, 24 and 29 of the native glucagon peptide or of the N- or C-terminal amino acid. In a further embodiment the side chains of amino acids corresponding to amino acid positions 16 and 24 of the native glucagon peptide are covalently bound to hydrophilic groups, and in some embodiments the hydrophilic group is polyethylene glycol (PEG).

[0915] Applicants have also discovered that native glucagon can be modified by introducing charge at its carboxy terminus to enhance the solubility of the peptide while retaining the agonist properties of the peptide. The enhanced solubility allows for the preparation and storage of glucagon solutions at near neutral pH. Formulating glucagon solutions at relatively neutral pHs (e.g. pH of about 6.0 to about 8.0) improves the long term stability of the Class 4 peptides.

[0916] Again, applicants anticipate that the Class 4 peptides disclosed herein can be similarly modified to enhance their solubility in aqueous solutions at relatively neutral pH (e.g. pH of about 6.0 to about 8.0) while retaining the antagonist properties of the parent protein. Accordingly, some embodiments of the present invention is directed to a Class 4 peptide of SEQ ID NO: 1339 that has been further modified relative to the native amino acids present at positions 6-29 of the wild type glucagon (SEQ ID NO: 1301) to add charge to the peptide by the substitution of native non-charged amino acids with charged amino acids, or the addition of charged amino acids to the carboxy terminus. In accordance with some embodiments, one to three of the non-charged native amino acids of the Class 4 peptide of SEQ ID NO: 1339 are replaced with a charged amino acid. In some embodiments the charged amino acid is selected from the group consisting of lysine, arginine, histidine, aspartic acid and glutamic acid. More particularly, applicants have discovered that substituting the normally occurring amino acid at corresponding position 28 and/or 29 relative to native glucagon with charged amino acids, and/or the addition of one to two charged amino acids at the carboxy terminus of the Class 4 peptide, enhances the solubility and stability of the Class 4 peptides in aqueous solutions at physiologically relevant pHs (i.e., a pH of about 6.5 to about 7.5). Accordingly, such modifications of the Class 4 peptide disclosed herein are anticipated to have a similar effect on the solubility in aqueous solutions, particularly at a pH ranging from about 5.5 to about 8.0, while retaining the parent peptide's biological activity.

[0917] In accordance with some embodiments the Class 4 peptide of SEQ ID NO: 1339 is modified by the substitution of the native amino acid at corresponding position 28 and/or 29 relative to native glucagon with a negatively charged amino acid (e.g., aspartic acid or glutamic acid) and optionally the addition of a negatively charged amino acid (e.g., aspartic acid or glutamic acid) to the carboxy terminus of the peptide. In an alternative embodiment the Class 4 peptide of SEQ ID NO: 1339 is modified by the substitution of the native amino acid at corresponding position 29 relative to native glucagon with a positively charged amino acid (e.g., lysine, arginine or histidine) and optionally the addition of one or two positively charged amino acid (e.g., lysine, arginine or histidine) on the carboxy terminus of the peptide. In accordance with some embodiments a Class 4 peptide having improved solubility and stability is provided wherein the peptide comprises the amino acid sequence of SEQ ID NO: 1341 with the proviso that at least one amino acids at position, 23, or 24 of SEQ ID NO: 1341 is substituted with an acidic amino acid, and/or an additional acidic amino acid is added at the carboxy terminus of SEQ ID NO: 1341. In some embodiments the acidic amino acids are independently selected from the group consisting of Asp, Glu, cysteic acid and homocysteic acid.

[0918] In accordance with some embodiments a Class 4 peptide having improved solubility and stability is provided wherein the antagonist comprises the amino acid sequence of SEQ ID NO: 1341, SEQ ID NO: 1342, SEQ ID NO: 1343 or SEQ ID NO: 1344, wherein at least one of the amino acids at positions 23 or 24 is substituted with a non-native amino acid residue (i.e. at least one amino acid present at position 23 or 24 of the analog is an acidic amino acid different from the amino acid present at the corresponding position in SEQ ID NO: 1307). In accordance with some embodiments a glucagon agonist is provided comprising the sequence of SEQ ID NO: 1341 or 1342 with the proviso that when the amino acid at position 23 is asparagine and the amino acid at position 24 is threonine, the peptide further comprises one to two amino acids, independently selected from the group consisting of Lys, Arg, His, Asp or Glu, added to the carboxy terminus of the Class 4 peptide.

[0919] In another embodiment the solubility of the Class 4 peptide of SEQ ID NO: 1342 can be improved by covalently linking a hydrophilic moiety to an amino acid residue at position 11, 12, 15, 16, 19 or 24, and in some embodiments the hydrophilic moiety is linked to an amino acid at position 11, 16 or 19, and in a further embodiment the hydrophilic moiety is linked to amino acid 19. In some embodiments the hydrophilic moiety is a plasma protein or the Fc portion of an immunoglobin, and in an alternative embodiment the hydrophilic moiety is a hydrophilic hydrocarbon chain. In some embodiments the hydrophilic moiety is polyethylene glycol, having a molecular weight selected from the range of about 1,000 to about 5,000 Daltons. In another embodiment the hydrophilic moiety is polyethylene glycol, having a molecular weight of at least about 20,000 Daltons. In some embodiments the polyethylene modified Class 4 peptide comprises the amino acids sequence of SEQ ID NO: 1309, SEQ ID NO: 1310, SEQ ID NO: 1311, SEQ ID NO: 1312, SEQ ID NO: 1343, SEQ ID NO: 1344 or SEQ ID NO: 1345.

### Modifications to Improve Stability

[0920] The Asp-Ser sequence at position 15-16 of native glucagon has been identified as a uniquely unstable dipeptide that leads to premature chemical cleavage of the native hormone in aqueous buffers. For example, when maintained at 0.01N HCl at 37° C. for 2 weeks, more than 50% of the native glucagon may be cleaved into fragments. The two liberated cleavage peptides 1-15 and 16-29 are devoid of glucagon-like biological activity and thus represent a limitation on the aqueous pre-formulation of glucagon and its related analogs. The selective chemical substitution of the Asp at position 15 of the native glucagon peptide with Glu has been observed to virtually eliminate chemical cleavage of the 15-16 peptide bond.

[0921] Accordingly, it is expected that the Class 4 peptides of the present invention can be similarly modified to decrease their susceptibility to premature chemical cleavage in aqueous buffers. In accordance with some embodiments the Class 4 peptides described herein can be further modified to enhance their stability in aqueous solutions by replacing the native aspartic amino acid, located at position 15 of the native glucagon peptide, with an amino acid selected from the group consisting of cysteic acid, glutamic acid, homoglutamic acid and homocysteic acid. In accordance with some embodiments the aspartic acid residue at position 10 of the Class 4 peptide of SEQ ID NO: 1339 can be substituted with an amino acid selected from the group consisting of cysteic acid, glutamic acid, homoglutamic acid and homocysteic acid, and in some embodiments the native aspartic acid at position 10 of SEQ ID NO: 1339 is replaced with glutamic acid. In accordance with some embodiments a Class 4 peptide having improved stability in aqueous solutions is provided wherein the antagonist comprises a sequence selected from the group consisting of SEQ ID NO: 1336, SEQ ID NO: 1340 and SEQ ID NO: 1342. In a further embodiment the Class 4 peptide is amidated.

[0922] In accordance with some embodiments, increased stability by way of reduced degradation of the Class 4 peptide described herein may also be achieved by substitution of the serine at position 16 (according to the numbering of native glucagon) with glutamic acid, cysteic acid, homo-glutamic acid, or homo-cysteic acid. In a specific embodiment, the serine at position 16 (according to the native glucagon sequence numbering) is replaced with glutamic acid. In a more specific aspect, the Class 4 peptide comprising such a modification comprises a C-terminal carboxylate and is not amidated.

[0923] In accordance with some embodiments, a Class 4 peptide is provided comprising a glucagon peptide selected from the group consisting of SEQ ID NO: 1307, SEQ ID NO: 1336, SEQ ID NO: 1339, SEQ ID NO: 1340, SEQ ID NO: 1341, SEQ ID NO: 1342, SEQ ID NO: 1343 and SEQ ID NO: 1344, further modified by one or more additional amino acid substitutions at positions corresponding to positions 11, 12, 15, 16, 19 and/or 24 of the native glucagon peptide, wherein the amino acid substitutions comprise a substitution with an amino acid having a side chain suitable for crosslinking with hydrophilic moieties, including for example, PEG. The peptide can be substituted with a naturally occurring amino acid or a synthetic (non-naturally occurring) amino acid. Synthetic or non-naturally occurring amino acids refer to amino acids that do not naturally occur in vivo but which, nevertheless, can be incorporated into the peptide structures described herein. In some embodiments a Class 4 peptide is provided wherein the peptide comprises the sequence of SEQ ID NO: 1307, SEQ ID NO: 1336, SEQ ID NO: 1339, SEQ ID NO: 1340, SEQ ID NO: 1341, SEQ ID NO: 1342, SEQ ID NO: 1343 and SEQ ID NO: 1344, and further comprises a polyethylene glycol chain bound to corresponding position 21 or 24 of the native glucagon peptide. In a further embodiment the C-terminus of the Class 4 peptide is modified to replace the carboxylic acid group with an amide group.

### Fusion Peptides and Conjugates

[0924] The present disclosure also encompasses Class 4 peptide fusion peptides wherein a second peptide has been fused to the C-terminus of the Class 4 peptide. More particularly, the fusion peptide may comprise a Class 4 peptide peptide of SEQ ID NO: 1344 that further comprises an amino acid sequence of SEQ ID NO: 1319 (GPSSGAPPPS), SEQ ID NO: 1320 (Lys Arg Asn Arg Asn Asn Ile Ala) or SEQ ID NO: 1321 (Lys Arg Asn Arg) linked to the c-terminal amino acid of the Class 4 peptide. In some embodiments the amino acid sequence of SEQ ID NO: 1319 (GPSSGAPPPS) is bound to amino acid 24 of the Class 4 peptide of SEQ ID NO: 1342 through a peptide bond. In another embodiment the fusion peptide comprises a Class 4 peptide peptide of SEQ ID NO: 1307, SEQ ID NO: 1336, SEQ ID NO: 1339, SEQ ID NO: 1340, SEQ ID NO: 1341 or SEQ ID NO: 1343 that further comprises an amino acid sequence of SEQ ID NO: 1319 (GPSSGAPPPS) linked to amino acid 24 of the Class 4 peptide. In another embodiment the fusion peptide comprises a Class 4 peptide peptide of SEQ ID NO: 1307, SEQ ID NO: 1336, SEQ ID NO: 1337, SEQ ID NO: 1338, SEQ ID NO: 1339, SEQ ID NO: 1341 or SEQ ID NO: 1343 that further comprises an amino acid sequence of SEQ ID NO: 1320, SEQ ID NO: 1321 or SEQ ID NO: 1353 linked to amino acid 24 of the Class 4 peptide. In some embodiments the Class 4 peptide fusion peptide comprises a sequence selected from the group consisting of SEQ ID NO: 1346 and SEQ ID NO 1347. In a further embodiment the C-terminus of the fusion peptide is modified to replace the carboxylic acid group with an amide group.

[0925] In some embodiments a Class 4 peptide fusion peptide is provided wherein the Class 4 peptide portion of the fusion peptide is selected from the group consisting of SEQ ID NO: 1303, SEQ ID NO: 1304, SEQ ID NO: 1305, SEQ ID NO: 1306, SEQ ID NO: 1307, SEQ ID NO: 1308, SEQ ID NO: 1309, SEQ ID NO: 1311, SEQ ID NO: 1312, SEQ ID NO: 1313, SEQ ID NO: 1314, SEQ ID NO: 1315, SEQ ID NO: 1310, SEQ ID NO: 1316, SEQ ID NO: 1317, SEQ ID NO: 1318 and SEQ ID NO: 1339 and the sequence of SEQ ID NO: 1319 is fused to the carboxy terminus of the Class 4 peptide portion, and wherein the PEG chain, when present, is selected from the range of 500 to 40,000 Daltons. More particularly, in some embodiments the Class 4 peptide segment is selected from the group consisting of SEQ ID NO: 1313, SEQ ID NO: 1314, SEQ ID NO: 1315, SEQ ID NO: 1316, SEQ ID NO: 1346 and SEQ ID NO: 1347 wherein the PEG chain is selected from the range of about 500 to about 5,000 Daltons, and more particularly, in some embodiments the PEG chain is about 1,000 Daltons. In a further embodiment the C-terminus is modified to replace the carboxylic acid group with an amide group.

[0926] The Class 4 peptide may further comprise one to two charged amino acids added to the carboxy terminus. In some embodiments, wherein one to two charged amino acids are added to the carboxy terminus of SEQ ID NO: 1344, the amino acids are negatively charged amino acids, including for example glutamic acid and aspartic acid. In some embodiments, the Class 4 peptide comprises the sequence of SEQ ID NO: 1342 wherein at least one of corresponding positions 27 and 28 relative to the native glucagon peptide comprises an amino acid selected from the group consisting of aspartic acid and glutamic acid and wherein SEQ ID NO: 1342 is optionally modified to include an addition one to two negatively charged amino acids added to the carboxy terminus. In some embodiments the negatively charged amino acids are glutamic acid or aspartic acid.

[0927] The Class 4 peptides disclosed herein can be combined with other active agents, including for example, insulin, to treat diseases or conditions that are characterized by excessive glucagon activity. In some embodiments, Class 4 peptides that have been modified to be covalently bound to a PEG chain having a molecular weight of greater than 10,000 Daltons can be administered in conjunction with insulin to help to maintain stable blood glucose levels in diabetics. The Class 4 peptides of the present disclosure can be co-administered with insulin as a single composition, simultaneously administered as separate solutions, or alternatively, the insulin and the Class 4 peptide can be administered at different times relative to one another. In some embodiments the composition comprising insulin and the composition comprising the Class 4 peptide are administered within 12 hours of one another. The exact ratio of the Class 4 peptide relative to the administered insulin will be dependent in part on determining the glucagon levels of the patient, and can be determined through routine experimentation.

### Dimer Peptides

[0928] The present disclosure also encompasses multimers of the modified Class 4 peptides disclosed herein. Two or more of the modified Class 4 peptides can be linked together using standard linking agents and procedures known to those skilled in the art. For example, dimers can be formed between two modified Class 4 peptides through the use of bifunctional thiol crosslinkers and bi-functional amine crosslinkers, particularly for Class 4 peptides that have been substituted (at positions 11, 16 or 19, for example) with cysteine, lysine ornithine, homocysteine or acetyl phenylalanine residues (e.g. SEQ ID NO: 1309, SEQ ID NO: 1310, SEQ ID NO: 1311 and SEQ ID NO: 1312). The dimer can be a homodimer or alternatively can be a heterodimer. In some embodiments the dimer is formed between two Class 4 peptides independently selected from the group consisting of SEQ ID NO: 1308, SEQ ID NO: 1309, SEQ ID NO: 1310, SEQ ID NO: 1311, SEQ ID NO: 1312, SEQ ID NO: 1345, SEQ ID NO: 1346, or SEQ ID NO: 1347, wherein the two peptides are linked to one another via a linker attached to position 11 of each peptide, 16 of each peptide, or position 19 of each peptide or any combination thereof. In some embodiments the linkage is a disulfide linkage between a Cys11 to Cys1 or a Cys 19 to Cys 19 or a Cys11 to Cys 19 residue of the respective Class 4 peptide peptides.

[0929] Similarly, a dimer can be formed between two Class 4 peptide peptides independently selected form the group consisting of SEQ ID NO: 1303, SEQ ID NO: 1304, SEQ ID NO: 1305, SEQ ID NO: 1306, SEQ ID NO: 1307, SEQ ID NO: 1308, SEQ ID NO: 1309, SEQ ID NO: 1310, SEQ ID NO: 1311, SEQ ID NO: 1312, SEQ ID NO: 1336, SEQ ID NO: 1337, SEQ ID NO: 1338, SEQ ID NO: 1339 and SEQ ID NO: 1342 wherein the linkage is formed between amino acid positions independently selected from positions 16, 21 and 24 with respect to the native glucagon peptide.

[0930] In accordance with some embodiments a Class 4 peptide dimer is provided comprising two Class 4 peptides, each comprising the sequence of SEQ ID NO: 1346, wherein the two antagonists are linked to one another by a disulfide bond through amino acid position 25. In another embodiment a Class 4 peptide dimer is provided comprising two Class 4 peptides, each comprising the sequence of SEQ ID NO: 1347, wherein the two antagonists are linked to one another by a disulfide bond through amino acid position 35. In some embodiments the dimer is formed from Class 4 peptides of SEQ ID NO: 1346 and SEQ ID NO: 1347 wherein the amino acid at position 10 is glutamic acid.

[0931] In some embodiments the dimer comprises a homodimer of a Class 4 peptide fusion peptide selected from the group consisting of SEQ ID NO: 1307, SEQ ID NO: 1308, SEQ ID NO: 1336, SEQ ID NO: 1337, SEQ ID NO: 1340, SEQ ID NO: 1339, NO: 1340, SEQ ID NO: 1341, SEQ ID NO: 1342 and pharmaceutically acceptable salts of said Class 4 peptides. In accordance with some embodiments a dimer is provided comprising a first Class 4 peptide bound to a second Class 4 peptide via a linker, wherein the first and second peptides of the dimer are independently selected from the group consisting of SEQ ID NO: 1307, SEQ ID NO: 1308, SEQ ID NO: 1336, SEQ ID NO: 1337, SEQ ID NO: 1339, SEQ ID NO: 1340, SEQ ID NO: 1341, and SEQ ID NO: 1342, and pharmaceutically acceptable salts of said glucagon polypeptides. In another embodiment the first and second Class 4 peptides of the dimer are independently selected from the group consisting of SEQ ID NO: 1307, SEQ ID NO: 1308, SEQ ID NO: 1336 and SEQ ID NO: 1339.

[0932] In another embodiment the dimer comprises a homodimer of a Class 4 peptide selected from the group consisting of SEQ ID NO: 1323, SEQ ID NO: 1324, SEQ ID NO: 1325, SEQ ID NO: 1326, SEQ ID NO: 1327, SEQ ID NO: 1328, SEQ ID NO: 1329, SEQ ID NO: 1330, SEQ ID NO: 1331. In another embodiment, a Class 4 peptide dimer is provided wherein the first and second peptides of the dimer comprise an amino acid sequence independently selected from the group consisting of SEQ ID NO: 1323, SEQ ID NO: 1324, SEQ ID NO: 1325, SEQ ID NO: 1326, SEQ ID NO: 1327 and SEQ ID NO: 1328. In another embodiment the dimer comprises a homodimer of a Class 4 peptide selected from the group consisting of SEQ ID NO: 1309, SEQ ID NO: 1311 and SEQ ID NO: 1312, wherein the peptide further comprises a polyethylene glycol chain covalently bound to position 11 or 19 of the glucagon peptide.

[0933] The Class 4 glucagon related peptide may comprise the amino acid sequence of any of SEQ ID NOs: 1301-1371, optionally with up to 1, 2, 3, 4, or 5 further modifications that retain glucagon antagonist activity.

### Class 5 Glucagon Related Peptides

[0934] In certain embodiments, a glucagon related peptide is a class 5 glucagon related peptide (see, e.g., International (PCT) Patent Application Publication No. WO 2009/058734, incorporated herein by reference in its entirety).

[0935] All biological sequences referenced in the following section (SEQ ID NOs: 1401-1518) correspond to SEQ ID NOs.: 1-118 in International Patent Application Publication No. WO 2009/058734.

### Activity

[0936] In certain aspects a class 5 glucagon related peptide (hereafter referred to as a “class 5 peptide”) may be a glucagon antagonist/GLP-1 agonist. Glucagon antagonists/GLP-1 agonists are utilized in any setting where the suppression of glucagon agonism is desired while simultaneous stimulation of GLP-1 activity is also desired. For example, glucagon antagonist activity in conjunction with GLP-1 stimulation can be used in the treatment of diabetes where glucagon antagonism has been demonstrated in pre-clinical models of hyperglycemia to yield a lowering of blood glucose and GLP-1 activity is associated with insulin production. Compounds demonstrating GLP-1 activity have also been known to be useful for treating obesity and preventing weight gain.

[0937] In certain aspects class 5 peptides are believed to be suitable for any use that has previously been described for other glucagon antagonist/GLP-1 agonists. These two activities have separately been shown to be highly desirable properties for the treatment of the metabolic syndrome, specifically diabetes and obesity. The glucagon antagonist activity is useful in any setting where the suppression of glucagon agonism is desired. The presence of GLP-1 agonism further suppresses the endogenous secretion of glucagon from the pancreas while stimulating insulin synthesis and secretion. The two pharmacological actions serve in a synergistic fashion to normalize metabolic abnormalities. Accordingly, the Class 5 peptides can be used to treat hyperglycemia, or treat other metabolic diseases that result from high blood levels of glucagon or high blood glucose levels. In accordance with some embodiments the patient to be treated using the glucagon antagonist/GLP-1 agonists such as class 5 peptides disclosed herein is a domesticated animal, and in another embodiment the patient to be treated is a human. Studies suggest that lack of glucagon suppression in diabetic patients contributes to postprandial hyperglycemia in part via accelerated glycogenolysis. Analysis of blood glucose during an Oral Glucose Tolerance Test (OGTT), and in the presence or absence of somatostatin-induced glucagon suppression has shown a significant increase in glucose in subjects with higher glucagon levels. Accordingly, a glucagon antagonist/GLP-1 agonists or Class 5 peptides described herein can be used to treating hyperglycemia, and are expected to be useful for treating a variety of types of diabetes including diabetes mellitus type I, diabetes mellitus type II, or gestational diabetes, either insulin-dependent or non-insulin-dependent, and reducing complications of diabetes including nephropathy, retinopathy and vascular disease.

[0938] Such methods for reducing appetite or promoting loss of body weight are expected to be useful in reducing body weight, preventing weight gain, or treating obesity of various causes, including drug-induced obesity, and reducing complications associated with obesity including vascular disease (coronary artery disease, stroke, peripheral vascular disease, ischemia reperfusion, etc.), hypertension, onset of diabetes type II, hyperlipidemia and musculoskeletal diseases.

[0939] Pharmaceutical compositions comprising class 5 peptides can be formulated and administered to patients using standard pharmaceutically acceptable carriers and routes of administration known to those skilled in the art. Accordingly, the present disclosure also encompasses pharmaceutical compositions comprising one or more class 5 peptides disclosed herein in combination with a pharmaceutically acceptable carrier. The pharmaceutical compositions may comprise the class 5 peptides as the sole pharmaceutically active component, or the class 5 peptides can be combined with one or more additional active agents. In accordance with some embodiments a composition is provided comprising a Class 5 peptide and insulin or an insulin analog. Alternatively, a composition is provided for inducing weight loss or preventing weight gain can be provided that comprises the sequence of SEQ ID NO: 1415 or SEQ ID NO: 1451 further comprising the amino acid sequence of SEQ ID NO: 1421 (GPSSGAPPPS) or SEQ ID NO: 1450 linked to amino acid 24 of SEQ ID NO: 1415 or SEQ ID NO: 1451, and an anti-obesity peptide. Suitable anti-obesity peptides include those disclosed in U.S. Pat. Nos. 5,691,309, 6,436,435 or US Patent application 20050176643.

### Class 5 Peptide Structure

[0940] In accordance with some embodiments a Class 5 peptide is provided comprising a glucagon peptide that has been modified by the deletion of the first 1 to 5 amino acids residues (e.g., first amino acid, first two amino acids, first three amino acids, first four amino acids, first five amino acids) from the N-terminus, and stabilization of the alpha-helix structure in the C-terminal portion of the compound (around amino acid positions 12-29 according to the amino acid numbering of wild type glucagon, SEQ ID NO: 1401), e.g., by the linkage of the side chains of amino acid pairs, selected from positions 12 and 16, 16 and 20, 20 and 24, and 24 and 28 (relative to the native glucagon peptide sequence), to one another through hydrogen-bonding or ionic interactions, such as the formation of salt bridges, or by covalent bonds. Alternatively, stabilization of the alpha-helix around residues 12-29 is achieved through introduction of one or more α, α-disubstituted amino acids at positions that retain the desired activity. In some embodiments, one, two, three, four or more of positions 16, 17, 18, 19, 20, 21, 24 or 29 (according to the amino acid numbering of wild type glucagon) of the Class 5 peptide or analog thereof is substituted with an α, α-disubstituted amino acid. For example, substitution of position 16 (according to the amino acid numbering of wild type glucagon) of a Class 5 peptide or analog thereof with amino iso-butyric acid (Aib) provides a stabilized alpha helix in the absence of a salt bridge or lactam. In some embodiments, one, two, three or more of positions 16, 20, 21 or 24 (according to the amino acid numbering of wild type glucagon) are substituted with Aib.

[0941] In accordance with some embodiments, a class 5 peptide is provided wherein the peptide exhibits at least 80% of the maximum agonism achieved by native GLP-1 at the GLP-1 receptor, and exhibits glucagon antagonist activity that reduces the maximum glucagon-induced cAMP production at the glucagon receptor by at least about 50%, as measured by cAMP production in an in vitro assay. In some embodiments, the class 5 peptide exhibits at least 90% of the activity of native GLP-1 at the GLP-1 receptor, and exhibits glucagon antagonist activity, that reduces the maximum glucagon-induced cAMP production at the glucagon receptor by at least about 80%.

[0942] In accordance with some embodiments the class 5 peptide comprises a derivative peptide of SEQ ID NO: 1402 wherein the peptide comprises further amino acid substitutions relative to SEQ ID NO: 1402 at one to three amino acid positions selected from positions 1, 2, 4, 5, 6, 7, 8, 9, 10, 11, 12, 13, 14, 15, 16, 19, 22 and 24, and exhibits at least 90% of the activity of native GLP-1 at the GLP-1 receptor, and exhibits glucagon antagonist activity, that reduces the maximum glucagon-induced cAMP production at the glucagon receptor by at least about 80%.

[0943] In some embodiments, the alpha-helix structure in the C-terminal portion of the Class 5 peptide (around amino acids 12-29 according to the amino acid numbering of wild type glucagon) is stabilized by, e.g., formation of a covalent or non-covalent intramolecular bridge, or substitution and/or insertion of amino acids around positions 12-29 with an alpha helix-stabilizing amino acid (e.g., an α,α-disubstituted amino acid). In some embodiments, one, two, three, four or more of positions 16, 17, 18, 19, 20, 21, 24 or 29 (according to the amino acid numbering of wild type glucagon) of the Class 5 peptide or analog thereof is substituted with an α, α-disubstituted amino acid e.g., amino isobutyric acid (Aib). For example, substitution of position 16 (according to the amino acid numbering of wild type glucagon) of a Class 5 peptide or analog thereof with amino iso-butyric acid (Aib) provides a stabilized alpha helix in the absence of a salt bridge or lactam.

[0944] In some embodiments the class 5 peptide comprises SEQ ID NO: 1415 or SEQ ID NO: 1451, and more particularly, a sequence selected from the group consisting of SEQ ID NO: 1405, SEQ ID NO: 1406, SEQ ID NO: 1407, SEQ ID NO: 1408, SEQ ID NO: 1409, SEQ ID NO: 1416, SEQ ID NO: 1417, SEQ ID NO: 1418, SEQ ID NO: 1419, SEQ ID NO: 1422, SEQ ID NO: 1423, SEQ ID NO: 1424 and SEQ ID NO: 1425. In further embodiments the class 5 peptide comprises a derivative peptide of SEQ ID NO: 1415 or SEQ ID NO: 1451 wherein the peptide comprises a further amino acid substitution relative to SEQ ID NO: 1415 or SEQ ID NO: 1451 at one to three amino acid positions selected from positions 1, 2, 5, 6, 8, 9, 12, 13 and 14. In some embodiments the substitutions at positions 1, 2, 5, 6, 8, 9, 12, 13 and 14 are conservative amino acid substitutions. In some embodiments the threonine at position 24 of SEQ ID NO: 1405 or SEQ ID NO: 1406 is substituted with glycine.

[0945] In accordance with some embodiments the class 5 peptide represents a further modification of the peptide wherein in addition to the N-terminal deletion, the phenylalanine at position 6 of the native glucagon peptide is modified, e.g., to comprise a hydroxyl group in place of the N-terminus amino group. In a further embodiment the natural carboxylic acid of the C-terminal amino acid is replaced with a charge-neutral group, such as an amide or ester.

[0946] In accordance with some embodiments, Class 5 peptides have been prepared wherein the first three to five amino acids of native glucagon have been deleted, the amino acid at position 9, relative to the native glucagon peptide, has been substituted with an amino acid selected from the group consisting of glutamic acid, homoglutamic acid, β-homoglutamic acid, a sulfonic acid derivative of cysteine, or an alkylcarboxylate derivative of cysteine having the structure of:

[chemical structure]

wherein X₅ is C1-C4 alkyl, C2-C4 alkenyl, or C2-C4 alkynyl, and the alpha-helix structure in the C-terminal portion of glucagon (around amino acids 12-29 according to the amino acid numbering of wild type glucagon) is stabilized, e.g., via a lactam bridge is formed between the side chains of amino acids 12 and 16 or between amino acids 16 and 20, relative to the native glucagon peptide. Examples of amino acid pairings that are capable of covalently bonding to form a seven-atom linking bridge are detailed through-out this disclosure. In some embodiments, the sulfonic acid derivative of cysteine is cysteic acid or homocysteic acid.

[0947] In some embodiments a class 5 is provided comprising an amino acid sequence selected from the group consisting of SEQ ID NO: 1405, SEQ ID NO: 1406, SEQ ID NO: 1407, or SEQ ID NO: 1408, wherein said peptide comprises a lactam ring formed between the side chains of amino acids 7 and 11 for SEQ ID NO: 1405, between 11 and 15 for SEQ ID NO: 1406, between positions 15 and 19 for SEQ ID NO: 1407 and between positions 19 and 24 for SEQ ID NO: 1408, each of said sequences being further modified to comprise a hydrophilic moiety covalently bound to the peptide. More particularly, in some embodiments each of the lactam bearing class 5 peptide are modified by covalent attachment of a polyethylene glycol chain. For example, for a class 5 peptide comprising SEQ ID NO: 1405, the peptide is pegylated at a position selected from the group consisting of 12, 15, 16, 19 and 24; for a class 5 peptide comprising SEQ ID NO: 1406, the peptide is pegylated at a position selected from the group consisting of 12, 16, 19 and 24; for a class 5 peptide comprising SEQ ID NO: 1407, the peptide is pegylated at a position selected from the group consisting of 11, 12, 16 and 24; for class 5 peptide comprising SEQ ID NO: 1408, the peptide is pegylated at a position selected from the group consisting of 11, 12, 15 and 16. In accordance with some embodiments a class 5 peptide comprising SEQ ID NO: 1447 or SEQ ID NO: 1448 is provided wherein the peptide is pegylated at a position selected from the group consisting of 12, 16, 19 and 24, relative to the SEQ ID NO: 1447 or SEQ ID NO: 1448 sequence. In a further embodiment the peptide of SEQ ID NO: 1447 or SEQ ID NO: 1448 is further modified by the addition of the sequence of SEQ ID NO: 1421 to the carboxy terminus of the peptide.

[0948] As detailed above in certain aspects Class 5 peptides are provided wherein the first five amino acids of native glucagon have been deleted, the amino group of the N-terminal amino acid (phenylalanine) has been replaced with a hydroxyl group (i.e., the first amino acid is phenyl-lactic acid) and the side chains of one or more amino acid pairs selected from positions 12 and 16, 16 and 20, 20 and 24, and 24 and 28 are linked to one another, thus stabilizing the Class 5 peptide alpha helix.

[0949] In accordance with some embodiments a class 5 peptide is provided comprising the sequence of SEQ ID NO: 1402 that is modified by a substitution of the serine residue at position 11 of SEQ ID NO: 1402 (position 16 according to the amino acid numbering of native glucagon) with an amino acid selected from the group consisting of glutamic acid, glutamine, homoglutamic acid, homocysteic acid, threonine or glycine. In accordance with some embodiments the serine residue at position 11 of SEQ ID NO: 1402 is substituted with an amino acid selected from the group consisting of glutamic acid, glutamine, homoglutamic acid and homocysteic acid, and in some embodiments the serine residue is substituted with glutamic acid. In accordance with some embodiments the class 5 peptide comprises the sequence of SEQ ID NO: 1438.

[0950] In some embodiments a class 5 peptide is provided wherein an intramolecular bridge is formed between two amino acid side chains to stabilize the three dimensional structure of the carboxy terminus of the peptide of SEQ ID NO: 1402. More particularly, the side chains of one or more amino acids selected from amino acid pairs 7 and 11, 11 and 15, 15 and 19 or 19 and 23 of SEQ ID NO: 1402 are linked to one another, thus stabilizing the alpha helix in the C-terminal portion. The two side chains can be linked to one another through hydrogen-bonding, ionic interactions (such as the formation of salt bridges), or by covalent bonds. In accordance with some embodiments the size of the linker is 7-9 atoms, and in some embodiments the size of the linker is 8 atoms. In some embodiments the class 5 peptide is selected from the group consisting of SEQ ID NO: 1405, SEQ ID NO: 1406, SEQ ID NO: 1407 and SEQ ID NO: 1408. In some embodiments the C-terminal amino acid of the class 5 peptide have an amide group substituting for the carboxylic acid group that is present on the native amino acid.

[0951] In accordance with some embodiments class 5 peptide is provided wherein the analog comprises an amino acid sequence of SEQ ID NO: 1409. In some embodiments the three dimensional structure of the carboxy terminus of the peptide of SEQ ID NO: 1409 is stabilized by the formation of covalent bonds between the side chains of the peptide. In some embodiments two amino acid side chains are bound to one another to form a lactam ring. The size of the lactam ring can vary depending on the length of the amino acid side chains, and in some embodiments the lactam is formed by linking the side chains of a lysine amino acid to a glutamic acid side chain. In some embodiments the C-terminal amino acid of the class 5 peptides have an amide group substituting for the carboxylic acid group that is present on the native amino acid.

[0952] The order of the amide bond in the lactam ring can be reversed (e.g., a lactam ring can be formed between the side chains of a Lys12 and a Glu 16 or alternatively between a Glu 12 and a Lys16). In accordance with some embodiments a glucagon analog of SEQ ID NO: 1409 is provided wherein at least one lactam ring is formed between the side chains of an amino acid pair selected from the group consisting of amino acid pairs 7 and 11, 11 and 15, 15 and 19 or 19 and 23 of SEQ ID NO: 1409. In some embodiments a class 5 peptide is provided wherein the peptide comprises the sequence of SEQ ID NO: 1410, said sequence further comprising an intramolecular lactam bridge formed between amino acid positions 7 and 11, or between amino acid positions 11 and 15, or between amino acid positions 15 and 19 of SEQ ID NO: 1410. In some embodiments a class 5 peptide is provided wherein the peptide comprises the sequence of SEQ ID NO: 1411, said sequence further comprising an intramolecular lactam bridge formed between amino acid positions 7 and 11, or between amino acid positions 11 and 15 of SEQ ID NO: 1411. In some embodiments the class 5 peptide comprises the sequence of SEQ ID NO: 1417.

[0953] Additional class 5 peptide are provided comprising derivatives of SEQ ID NO: 1405, wherein the aspartic acid at position 10 of SEQ ID NO: 1405 (position 15 of native glucagon) has been substituted with glutamic acid, an amino acid of the general structure:

[chemical structure]

wherein X₆ is C1-C3 alkyl, C2-C3 alkene or C2-C3 alkynyl, and in some embodiments X₆ is C1-C3 alkyl, and in another embodiment X₆ is C2 alkyl. In some embodiments a Class 5 peptide derivative of SEQ ID NO: 1409 is provided wherein position 10 of SEQ ID NO: 1409 (position 15 of native glucagon) is substituted with an amino acid selected from the group consisting of glutamic acid, cysteic acid, homocysteic acid and homoglutamic acid. In a further embodiment position 10 of SEQ ID NO: 1409 is substituted with an amino acid selected from the group consisting of cysteic acid or homocysteic acid. In some embodiments a Class 5 peptide derivative of SEQ ID NO: 1406, SEQ ID NO: 1407 or SEQ ID NO: 1408 is provided wherein position 10 of SEQ ID NO: 1406, SEQ ID NO: 1407 or SEQ ID NO: 1408 is substituted with an amino acid selected from the group consisting of glutamic acid, cysteic acid, homocysteic acid and homoglutamic acid. In some embodiments the C-terminal amino acid of a class 5 peptide have an amide group substituting for the carboxylic acid group that is present on the native amino acid.

[0954] In some embodiments an amino acid of class 5 peptide is substituted with at least one cysteine residue, wherein the side chain of the cysteine residue is further modified with a thiol reactive reagent, including for example, maleimido, vinyl sulfone, 2-pyridylthio, haloalkyl, and haloacyl. These thiol reactive reagents may contain carboxy, keto, hydroxyl, and ether groups as well as other hydrophilic moieties such as polyethylene glycol units. In an alternative embodiment, an amino acid of a class 5 peptide is substituted with lysine, and the side chain of the substituting lysine residue is further modified using amine reactive reagents such as active esters (succinimido, anhydride, etc) of carboxylic acids or aldehydes of hydrophilic moieties such as polyethylene glycol. In accordance with some embodiments the lysine residue corresponding to position 7 of the peptide of SEQ ID NO: 1405 is substituted with arginine and a single lysine substitution is inserted for one of the amino acids corresponding to position 12, 15, 16, 19 and 24 of SEQ ID NO: 1405.

[0955] In another embodiment the methionine residue corresponding to position 22 of the class 5 peptides disclosed herein is changed to leucine or norleucine to prevent oxidative degradation of the peptide.

[0956] Moreover class 5 peptides, in some aspects, also encompass amino acid substitutions at positions that are known not to be critical to the function of the glucagon analog. In some embodiments the substitutions are conservative amino acid substitutions at one, two or three positions selected from the group consisting of 2, 5, 6, 7, 8, 9, 12, 13, 14, 15, 16, 19, 22, 23 or 24. In some embodiments the amino acids corresponding to positions 16, 17, 20, 21, 24 or 29 of the native glucagon peptide, and more particularly at position 21 and/or 24 relative to native glucagon are substituted with cysteine or lysine, wherein a PEG chain is covalently attached to the substituted cysteine or lysine residue.

[0957] In accordance with some embodiments, a class 5 peptide is provided comprising a sequence consisting of SEQ ID NO: 1409, further modified by one or more additional amino acid substitutions at positions corresponding to positions 11, 12, 15, 16, 19 and/or 24 of the peptide (including for example substitution with cysteine), wherein the amino acid substitution comprises an amino acid having a side chain suitable for crosslinking with hydrophilic moieties, including for example, PEG. Native glucagon can be substituted with a naturally occurring amino acid or a synthetic (non-naturally occurring) amino acid. Synthetic or non-naturally occurring amino acids refer to amino acids that do not naturally occur in vivo but which, nevertheless, can be incorporated into the peptide structures described herein. In some embodiments a Class 5 peptide is provided wherein the peptide comprises the sequence of SEQ ID NO: 1409 and further comprises a polyethylene glycol chain bound to position 16 or 19 of the peptide. In a further embodiment the C-terminus of the glucagon analog is modified to replace the carboxylic acid group with an amide group.

[0958] In accordance with some embodiments a class 5 peptide is provided comprising a glucagon analog selected from the group consisting of:

(SEQ ID NO: 1439)
R₁-Phe-Thr-Ser-Xaa-Tyr-Ser-Lys-Tyr-Leu-Xaa-Glu-Arg-Arg-Ala-Gln-Asp-Phe-Val-
Gln-Trp-Leu-Xaa-Asn-Thr-R₂
(SEQ ID NO: 1413)
R₁-Phe-Thr-Ser-Xaa-Tyr-Ser-Lys-Tyr-Leu-Asp-Glu-Arg-Arg-Ala-Gln-Xaa-Phe-Val-
Gln-Trp-Leu-Xaa-Asn-Thr-R₂,
(SEQ ID NO: 1414)
R₁-Phe-Thr-Ser-Xaa-Tyr-Ser-Lys-Tyr-Leu-Asp-Glu-Arg-Arg-Ala-Gln-Asp-Phe-Val-
Xaa-Trp-Leu-Xaa-Asn-Thr-R₂
and
(SEQ ID NO: 1412)
R₁-Phe-Thr-Ser-Xaa-Tyr-Ser-Lys-Tyr-Leu-Asp-Glu-Arg-Arg-Ala-Gln-Xaa-Phe-Val-
Xaa-Trp-Leu-Xaa-Asn-Thr-R₂,

wherein Xaa at position 4=aspartic acid, glutamic acid, cysteic acid or homocysteic acid, Xaa at position 10=Asp, Glu, cysteic acid, homoglutamic acid and homocysteic acid, Xaa at position 16 is Asp, Cys, Orn, homocysteine or acetyl phenylalanine and the Xaa at position 19 is Gln, Cys, Orn, homocysteine and acetyl phenylalanine, Xaa at position 22=Met, Leu or Nle, R₁ is OH or NH₂, and R₂ is Gly Pro Ser Ser Gly Ala Pro Pro Pro Ser (SEQ ID NO: 1421), Gly Pro Ser Ser Gly Ala Pro Pro Pro Ser Xaa (SEQ ID NO: 1450; wherein Xaa is Cys, Orn, homocystein or acetyl phenyalanine), COOH or CONH₂, wherein the peptide is optionally pegylated at position 16 of SEQ ID NO: 1413, position 19 of SEQ ID NO: 1414 and at positions 16 and 19 of SEQ ID NO: 1412. In some embodiments the Thr at position 24 of SEQ ID NOs: 1412-1414 and 1439 is substituted with Gly. In accordance with some embodiments the peptide comprises the sequence of SEQ ID NO: 13 or SEQ ID NO: 1414, wherein R₁ is OH. In accordance with some embodiments the peptide comprises the sequence of SEQ ID NO: 1413 or SEQ ID NO: 1414, wherein R₁ is OH and R₂ is CONH₂. In accordance with some embodiments the peptide comprises the sequence of SEQ ID NO: 1413 or SEQ ID NO: 1414, wherein R₁ is OH, R₂ is CONH₂ and the threonine at position 24 is substituted with glycine.

[0959] In some embodiments, a class 5 peptide is further modified to comprise one or more amino acids of native GLP-1 by substitution of the native glucagon residue(s) at corresponding amino acid positions. For example, the class 5 peptide may comprise one or more amino acid substitutions at any of positions 2, 3, 17, 18, 21, 23, and 24 (according to the amino acid numbering of native glucagon). In a specific embodiment, the class 5 peptide is modified by one or more of the following amino acid substitutions: Ser2 is replaced with Ala, Gln3 is replaced with Glu, Arg17 is replaced with Gln, Arg at position 18 is replaced with Ala, Asp at position 21 is replaced with Glu, Val at position 23 is replaced with Ile, and Gln at position 24 is replaced with Ala (amino acid positions are in accordance with the native glucagon sequence). In a specific embodiment, the class 5 peptide is modified by replacing Ser2 with Ala and Gln3 with Glu (according to the amino acid numbering of native glucagon). In another specific embodiment, the class 5 peptide is modified with all of the following amino acid substitutions: Arg17 is replaced with Gln, Arg at position 18 is replaced with Ala, Asp at position 21 is replaced with Glu, Val at position 23 is replaced with Ile, and Gln at position 24 is replaced with Ala (amino acid numbering according to native glucagon). In yet another specific embodiment, the class 5 peptide is modified to comprise just Glu at position 21 (according to the numbering of SEQ ID NO: 1401). Accordingly, the class 5 peptide can comprise the amino acid sequence of any of SEQ ID NOs: 1460-1470, 1473-1478, 1480-1488, 1490-1496, 1503, 1504, 1506, and 1514-1518.

[0960] Also provided herein is a class 5 peptide or conjugate thereof comprising (1) a stabilized alpha helix through means described herein (e.g., through an intramolecular bridge, or incorporation of one or more alpha, alpha-di-substituted amino acids, or an acidic amino acid at position 16 (according to the numbering of SEQ ID NO:1401), or a combination thereof; (2) a C-terminal amide or ester in place of a C-terminal carboxylate, and (3) a general structure of A-B-C,

wherein A is selected from the group consisting of

[0961] (i) phenyl lactic acid (PLA);

[0962] (ii) an oxy derivative of PLA; and

[0963] (iii) a peptide of 2 to 6 amino acids in which two consecutive amino acids of the peptide are linked via an ester or ether bond;

wherein B represents amino acids p to 26 of SEQ ID NO: 1401, wherein p is 3, 4, 5, 6, or 7, optionally comprising one or more amino acid modifications, as described herein, including, for example, any of the modifications described for Class 5 peptides. For instance the one or more modification may be selected from the group consisting of:

[0964] (iv) Asp at position 9 (according to the amino acid numbering of SEQ ID NO: 1401) is substituted with a Glu, a sulfonic acid derivative of Cys, homoglutamic acid, β-homoglutamic acid, or an alkylcarboxylate derivative of cysteine having the structure of:

[chemical structure]

wherein X₅ is C1-C4 alkyl, C2-C4 alkenyl, or C2-C4 alkynyl;

[0965] (v) substitution of one or two amino acids at positions 10, 20, and 24, (according to the amino acid numbering of SEQ ID NO: 1401) with an amino acid covalently attached to an acyl or alkyl group via an ester, ether, thioether, amide, or alkyl amine linkage;

[0966] (vi) substitution of one or two amino acids at positions 16, 17, 20, 21, and 24 (according to the amino acid numbering of SEQ ID NO: 1401) with an amino acid selected from the group consisting of: Cys, Lys, ornithine, homocysteine, and acetyl-phenylalanine (Ac-Phe), wherein the amino acid of the group is covalently attached to a hydrophilic moiety;

[0967] (vii) Asp at position 15 (according to the numbering of SEQ ID NO: 1401) is substituted with cysteic acid, glutamic acid, homoglutamic acid, and homocysteic acid;

[0968] (viii) Ser at position 16 (according to the numbering of SEQ ID NO: 1401) is substituted with cysteic acid, glutamic acid, homoglutamic acid, and homocysteic acid;

[0969] (ix) Arg at position 17 is replaced with Gln, Arg at position 18 is replaced with Ala, Asp at position 21 is replaced with Glu, Val at position 23 is replaced with Ile, and Gln at position 24 is replaced with Ala (according to amino acid numbering of SEQ ID NO: 1401);

[0970] (x) Ser at position 16 is replaced with Glu, Gln at position 20 is replaced with Glu, or Gln at position 24 is replaced with Glu(according to the amino acid numbering of SEQ ID NO: 1401);

wherein C (of the general structure of A-B-C) is selected from the group consisting of:

[0971] (vii) X;

[0972] (viii) X-Y;

[0973] (ix) X-Y-Z;

[0974] (x) X-Y-Z-R10;

wherein X is Met, Leu, or Nle; Y is Asn or a charged amino acid; Z is Thr, Gly, Cys, Lys, ornithine (Orn), homocysteine, acetyl phenylalanine (Ac-Phe), or a charged amino acid; wherein R10 is selected from a group consisting of SEQ ID NOs: 1421, 1426, 1427, and 1450.

[0975] In a specific aspect, the peptide comprises an oxy derivative of PLA. As used herein “oxy derivative of PLA” refers to a compound comprising a modified structure of PLA in which the hydroxyl group has been replaced with O—R₁₁, wherein R₁₁ is a chemical moiety. In this regard, the oxy derivative of PLA can be, for example, an ester of PLA or an ether of PLA.

[0976] Methods of making oxy derivatives of PLA are known in the art. For example, when the oxy derivative is an ester of PLA, the ester may be formed by upon reaction of the hydroxyl of PLA with a carbonyl bearing a nucleophile. The nucleophile can be any suitable nucleophile, including, but not limited to an amine or hydroxyl. Accordingly, the ester of PLA can comprise the structure of Formula IV:

[chemical structure]

wherein R₇ is an ester formed upon reaction of the hydroxyl of PLA with a carbonyl bearing a nucleophile.

[0977] The carbonyl bearing a nucleophile (which reacts with the hydroxyl of PLA to form an ester) can be, for example, a carboxylic acid, a carboxylic acid derivative, or an activated ester of a carboxylic acid. The carboxylic acid derivative can be, but is not limited to, an acyl chloride, an acid anhydride, an amide, an ester, or a nitrile. The activated ester of a carboxylic acid can be, for example, N-hydroxysuccinimide (NHS), tosylate (Tos), a carbodiimide, or a hexafluorophosphate. In some embodiments, the carbodiimide is 1,3-dicyclohexylcarbodiimide (DCC), 1,1′-carbonyldiimidazole (CDI), 1-ethyl-3-(3-dimethylaminopropyl)carbodiimide hydrochloride (EDC), or 1,3-diisopropylcarbodiimide (DICD). In some embodiments, the hexafluorophosphate is selected from a group consisting of hexafluorophosphate benzotriazol-1-yl-oxy-tris(dimethylamino)phosphonium hexafluorophosphate (BOP), benzotriazol-1-yl-oxytripyrrolidinophosphonium hexafluorophosphate (PyBOP), 2-(1H-7-azabenzotriazol-1-yl)-1,1,3,3-tetramethyl uronium hexafluorophosphate (HATU), and o-benzotriazole-N,N,N′,N′-tetramethyl-uronium-hexafluoro-phosphate (HBTU).

[0978] Methods of making ethers from reaction with a hydroxyl group (e.g., the hydroxyl of PLA) also are known in the art. For example, the hydroxyl group of PLA may be reacted with a halogenated alkyl or tosylated alkyl alcohol to form an ether bond.

[0979] In a specific embodiment, the chemical moiety bound to PLA via an oxygen-containing bond (e.g., via an ester or ether bond) is a polymer (e.g., a polyalkylene glycol), a carbohydrate, an amino acid, a peptide, or a lipid, e.g., a fatty acid or a steroid.

[0980] In a specific embodiment, the chemical moiety is an amino acid, which, optionally, is a part of a peptide, such that Formula IV is a depsipeptide. In this regard, PLA may be at a position other than the N-terminal amino acid residue of the peptide, such that the peptide comprises one or more (e.g., 1, 2, 3, 4, 5, 6, or more) amino acids N-terminal to the PLA residue. For example, the peptide can comprise PLA at position n, wherein n is 2, 3, 4, 5, or 6 of the peptide.

[0981] The amino acids N-terminal to the PLA residue may be synthetic or naturally-occurring. In a specific embodiment, the amino acids which are N-terminal PLA are naturally-occurring amino acids. In some embodiments, the amino acids which are N-terminal to PLA are the N-terminal amino acids of native glucagon. For example, the peptide can comprise at the N-terminus the amino acid sequence of any of SEQ ID NOs: 1452-1456, wherein PLA is linked to threonine via an ester bond:

SEQ ID NO: 1452
His-Ser-Gln-Gly-Thr-PLA
SEQ ID NO: 1453
Ser-Gln-Gly-Thr-PLA
SEQ ID NO: 1454
Gln-Gly-Thr-PLA
SEQ ID NO: 1455
Gly-Thr-PLA
SEQ ID NO: 1456
Thr-PLA

[0982] In an alternative embodiment, one or more of the N-terminal amino acids may be substituted with an amino acid other than the amino acid of native glucagon. For example, when the peptide comprises PLA as the amino acid at position 5 or 6, the amino acid at position 1 and/or position 2 may be an amino acid which reduces susceptibility to cleavage by dipeptidyl peptidase IV. More particularly, in some embodiments, position 1 of the peptide is an amino acid selected from the group consisting of D-histidine, alpha, alpha-dimethyl imidiazole acetic acid (DMIA), N-methyl histidine, alpha-methyl histidine, imidazole acetic acid, desaminohistidine, hydroxyl-histidine, acetyl-histidine and homo-histidine. More particularly, in some embodiments, position 2 of the antagonist/agonist peptide is an amino acid selected from the group consisting of D-serine, D-alanine, valine, glycine, N-methyl serine, N-methyl alanine, and aminoisobutyric acid (Aib). Also, for example, when the peptide comprises PLA as the amino acid at position 4, 5, or 6, the amino acid at position 3 of the peptide may be glutamic acid, as opposed to the native glutamine residue of native glucagon. In an exemplary embodiment of the invention, the peptide comprises at the N-terminus the amino acid sequence of any of SEQ ID NOs: 1457-1459.

[0983] With respect to the peptides comprising a compound of Formula IV, the polymer may be any polymer, provided that it can react with the hydroxyl group of PLA. The polymer may be one that naturally or normally comprises a carbonyl bearing a nucleophile. Alternatively, the polymer may be one which was derivatized to comprise the carbonyl bearing the carbonyl. The polymer may be a derivatized polymer of any of: polyamides, polycarbonates, polyalkylenes and derivatives thereof including, polyalkylene glycols, polyalkylene oxides, polyalkylene terepthalates, polymers of acrylic and methacrylic esters, including poly(methyl methacrylate), poly(ethyl methacrylate), poly(butylmethacrylate), poly(isobutyl methacrylate), poly(hexylmethacrylate), poly(isodecyl methacrylate), poly(lauryl methacrylate), poly(phenyl methacrylate), poly(methyl acrylate), poly(isopropyl acrylate), poly(isobutyl acrylate), and poly(octadecyl acrylate), polyvinyl polymers including polyvinyl alcohols, polyvinyl ethers, polyvinyl esters, polyvinyl halides, poly(vinyl acetate), and polyvinylpyrrolidone, polyglycolides, polysiloxanes, polyurethanes and co-polymers thereof, celluloses including alkyl cellulose, hydroxyalkyl celluloses, cellulose ethers, cellulose esters, nitro celluloses, methyl cellulose, ethyl cellulose, hydroxypropyl cellulose, hydroxy-propyl methyl cellulose, hydroxybutyl methyl cellulose, cellulose acetate, cellulose propionate, cellulose acetate butyrate, cellulose acetate phthalate, carboxylethyl cellulose, cellulose triacetate, and cellulose sulphate sodium salt, polypropylene, polyethylenes including poly(ethylene glycol), poly(ethylene oxide), and poly(ethylene terephthalate), and polystyrene.

[0984] The polymer can be a biodegradable polymer, including a synthetic biodegradable polymer (e.g., polymers of lactic acid and glycolic acid, polyanhydrides, poly(ortho)esters, polyurethanes, poly(butic acid), poly(valeric acid), and poly(lactide-cocaprolactone)), and a natural biodegradable polymer (e.g., alginate and other polysaccharides including dextran and cellulose, collagen, chemical derivatives thereof (substitutions, additions of chemical groups, for example, alkyl, alkylene, hydroxylations, oxidations, and other modifications routinely made by those skilled in the art), albumin and other hydrophilic proteins (e.g., zein and other prolamines and hydrophobic proteins)), as well as any copolymer or mixture thereof. In general, these materials degrade either by enzymatic hydrolysis or exposure to water in vivo, by surface or bulk erosion.

[0985] The polymer can be a bioadhesive polymer, such as a bioerodible hydrogel described by H. S. Sawhney, C. P. Pathak and J. A. Hubbell in Macromolecules, 1993, 26, 581-587, the teachings of which are incorporated herein, polyhyaluronic acids, casein, gelatin, glutin, polyanhydrides, polyacrylic acid, alginate, chitosan, poly(methyl methacrylates), poly(ethyl methacrylates), poly(butylmethacrylate), poly(isobutyl methacrylate), poly(hexylmethacrylate), poly(isodecyl methacrylate), poly(lauryl methacrylate), poly(phenyl methacrylate), poly(methyl acrylate), poly(isopropyl acrylate), poly(isobutyl acrylate), and poly(octadecyl acrylate).

[0986] In some embodiments, the polymer is a water-soluble polymer. Suitable water-soluble polymers are known in the art and include, for example, polyvinylpyrrolidone, hydroxypropyl cellulose (HPC; Klucel), hydroxypropyl methylcellulose (HPMC; Methocel), nitrocellulose, hydroxypropyl ethylcellulose, hydroxypropyl butylcellulose, hydroxypropyl pentylcellulose, methyl cellulose, ethylcellulose (Ethocel), hydroxyethyl cellulose, various alkyl celluloses and hydroxyalkyl celluloses, various cellulose ethers, cellulose acetate, carboxymethyl cellulose, sodium carboxymethyl cellulose, calcium carboxymethyl cellulose, vinyl acetate/crotonic acid copolymers, poly-hydroxyalkyl methacrylate, hydroxymethyl methacrylate, methacrylic acid copolymers, polymethacrylic acid, polymethylmethacrylate, maleic anhydride/methyl vinyl ether copolymers, poly vinyl alcohol, sodium and calcium polyacrylic acid, polyacrylic acid, acidic carboxy polymers, carboxypolymethylene, carboxyvinyl polymers, polyoxyethylene polyoxypropylene copolymer, polymethylvinylether co-maleic anhydride, carboxymethylamide, potassium methacrylate divinylbenzene co-polymer, polyoxyethyleneglycols, polyethylene oxide, and derivatives, salts, and combinations thereof.

[0987] In a specific embodiment, the polymer is a polyalkylene glycol, including, for example, polyethylene glycol (PEG).

[0988] The carbohydrate may be any carbohydrate provided that it comprises or is made to comprise a carbonyl with an alpha leaving group. The carbohydrate, for example, may be one which has been derivatized to comprise a carbonyl with an alpha leaving group. In this regard, the carbohydrate may be a derivatized form of a monosaccharide (e.g., glucose, galactose, fructose), a disaccharide (e.g., sucrose, lactose, maltose), an oligosaccharide (e.g., raffinose, stachyose), a polysaccharide (a starch, amylase, amylopectin, cellulose, chitin, callose, laminarin, xylan, mannan, fucoidan, galactomannan.

[0989] The lipid may be any lipid comprising a carbonyl with an alpha leaving group. The lipid, for example, may be one which is derivatized to comprise the carbonyl. In this regard, the lipid, may be a derivative of a fatty acid (e.g., a C4-C30 fatty acid, eicosanoid, prostaglandin, leukotriene, thromboxane, N-acyl ethanolamine), glycerolipid (e.g., mono-, di-, tri-substituted glycerols), glycerophospholipid (e.g., phosphatidylcholine, phosphatidylinositol, phosphatidylethanolamine, phosphatidylserine), sphingolipid (e.g., sphingosine, ceramide), sterol lipid (e.g., steroid, cholesterol), prenol lipid, saccharolipid, or a polyketide. In some embodiments, the lipid is an oil, wax, cholesterol, sterol, fat-soluble vitamin, monoglyceride, diglyceride, triglyceride, or a phospholipid.

[0990] In some embodiments, R₇ has a molecular weight of about 100 kDa or less, e.g., about 90 kDa or less, about 80 kDa or less, about 70 kDa or less, about 60 kDa or less, about 50 kDa or less, about 40 kDa or less. Accordingly, R7 can have a molecular weight of about 35 kDa or less, about 30 kDa or less, about 25 kDa or less, about 20 kDa or less, about 15 kDa or less, about 10 kDa or less, about 5 kDa or less, or about 1 kDa.

[0991] In an alternative embodiment, the peptide comprising the general structure of A-B-C comprises, as A, a peptide of 2 to 6 amino acids in which two consecutive amino acids of the peptide of A are linked via an ester or ether bond. The ester or ether bond may be, e.g., between amino acids 2 and 3, 3 and 4, 4 and 5, or 5 and 6. Optionally the peptide of A may be further modified by covalent linkage to another chemical moiety including linkage to a polymer (e.g. a hydrophilic polymer), alkylation, or acylation.

[0992] In a specific embodiment, the above-described class 5 peptide comprising PLA is modified to comprise an oxy derivative of PLA, such as, for instance, an ester of PLA or an ether of PLA. For example, the class 5 peptide can comprise the amino acid sequence of any of SEQ ID NOs: 1402, 1405-1420, 1422-1425, 1432-1436, 1438, 1439, 1445, 1446, and 1451, wherein the PLA is linked via an ester or ether bond to an amino acid, peptide, polymer, acyl group, or alkyl group. The amino acid, peptide, polymer, acyl group, or alkyl group may be any of those described herein. In the case that the PLA is linked via an ester bond to an amino acid or peptide, the class 5 peptide may be considered as a depsipeptide.

[0993] Also, in another specific embodiment, the above-described class 5 peptide which lacks PLA is modified to comprise at least one ester bond or ether bond between two consecutive amino acids which are N-terminal to the amino acid at position 7 (according to the numbering of native glucagon). In a specific embodiment, the class 5 peptide comprises at least one ester or ether bond between the two consecutive amino acids. In a more specific embodiment, the Class 5 peptide comprises the N-terminal 6 amino acids of SEQ ID NO: 1401 and two consecutive amino acids of the N-terminal 6 amino acids are linked via an ester or ether bond.

[0994] The peptide of A may comprise any amino acids, synthetic or naturally occurring, provided that at least two consecutive amino acids are linked via an ester or ether bond. In a specific embodiment, the peptide of A comprises amino acids of native glucagon. The amino acid at position 1 and/or position 2 may be an amino acid which reduces susceptibility to cleavage by dipeptidyl peptidase IV. For instance, the peptide of A can comprise at position 1 an amino acid selected from the group consisting of D-histidine, alpha, alpha-dimethyl imidiazole acetic acid (DMIA), N-methyl histidine, alpha-methyl histidine, imidazole acetic acid, desaminohistidine, hydroxyl-histidine, acetyl-histidine and homo-histidine. More particularly, in some embodiments, position 2 of the peptide of A is an amino acid selected from the group consisting of D-serine, D-alanine, valine, glycine, N-methyl serine, N-methyl alanine, and aminoisobutyric acid (Aib). Also, for example, the amino acid at position 3 of the peptide of A may be glutamic acid, as opposed to the native glutamine residue of native glucagon. Accordingly, the peptide of general structure of A-B-C can comprise an amino acid sequence of:

(SEQ ID NO: 1507)
Xaa1-Xaa2-Xaa3-Thr-Gly-Phe;
(SEQ ID NO: 1508)
Xaa2-Xaa3-Thr-Gly-Phe;
or
(SEQ ID NO: 1509)
Xaa3-Thr-Gly-Phe;

wherein Xaa1 is selected from a group consisting of: His, D-histidine, alpha, alpha-dimethyl imidiazole acetic acid (DMIA), N-methyl histidine, alpha-methyl histidine, imidazole acetic acid, desaminohistidine, hydroxyl-histidine, acetyl-histidine and homo-histidine; Xaa2 is selected from a group consisting of: Ser, D-serine, D-alanine, valine, glycine, N-methyl serine, N-methyl alanine, and aminoisobutyric acid (Aib); and Xaa3 is Gln or Glu.

[0995] In some embodiments, B is modified by up to three amino acid modifications. For example, B, which represents native amino acid sequence of SEQ ID NO: 1401 is modified by one or more conservative amino acid modifications.

[0996] In another embodiment, B comprises one or more amino acid modifications selected from the group consisting of (iv) to (x), as described herein. In a specific embodiment, B comprises one or both of the amino acid modifications (v) and (vi). In a further specific embodiment, B comprises one or a combination of amino acid modifications selected from the group consisting of (iv), (vii), (viii), (ix), and (x), in addition to (v) and (vi).

[0997] As described herein, the peptide comprising the general structure A-B-C may comprise one or more charged amino acids at the C-terminus, e.g., as Y and/or Z, as described herein. Alternatively or additionally, the peptide comprising the general structure A-B-C may further comprise one to two charged amino acids C-terminal to Z, when C comprises X-Y-Z. The charged amino acids can be, for example, one of Lys, Arg, His, Asp, and Glu. In a specific embodiment, Y is Asp.

[0998] In some embodiments, the peptide comprising the general structure A-B-C comprises a hydrophilic moiety covalently bound to an amino acid residue at position 1, 16, 20, 21, or 24 (according to the amino acid numbering of SEQ ID NO: 1401), or at the N- or C-terminal residue of the peptide comprising the general structure A-B-C. In a specific embodiment, the hydrophilic moiety is attached to a Cys residue of the peptide comprising the general structure A-B-C. In this regard, the amino acid at position 16, 21, 24, or 29 of native glucagon (SEQ ID NO: 1401) may be substituted with a Cys residue. Alternatively, a Cys residue comprising a hydrophilic moiety may be added to the C-terminus of the peptide comprising the general structure A-B-C as position 30 or as position 40, e.g., when the peptide comprising the general structure A-B-C comprises a C-terminal extension (positions according to the amino acid numbering of SEQ ID NO: 1401). Alternatively, the hydrophilic moiety may be attached to the PLA of the peptide comprising the general structure A-B-C via the hydroxyl moiety of PLA. The hydrophilic moiety can be any of those described herein, including, for example, polyethylene glycol.

[0999] In a specific aspect, the peptide comprising the general structure A-B-C comprises a stabilized alpha helix by virtue of incorporation of an intramolecular bridge. In some embodiments, the intramolecular bridge is a lactam bridge. The lactam bridge may be between the amino acids at positions 9 and 12, the amino acids at positions 12 and 16, the amino acids at positions 16 and 20, the amino acids at positions 20 and 24, or the amino acids at positions 24 and 28 (according to the amino acid numbering of SEQ ID NO: 1401). In a specific embodiment, the amino acids at positions 12 and 16 or at positions 16 and 20 (according to the amino acid numbering of SEQ ID NO: 1401) are linked via a lactam bridge. Other positions of the lactam bridge are contemplated.

[1000] Additionally or alternatively, the peptide comprising the general structure A-B-C can comprise an alpha, alpha di-substituted amino acid at, for example, any of positions 16, 20, 21, or 24 (according to the amino acid numbering of SEQ ID NO: 1401). In some embodiments, the alpha, alpha di-substituted amino acid is Aib. In a specific aspect, the Aib is located at position 16 (according to the numbering of SEQ ID NO: 1401).

[1001] Alternatively or additionally, the peptide comprising the general structure A-B-C may be modified to comprise an acidic amino acid at position 16 (according to the numbering of SEQ ID NO: 1401), which modification enhances the stability of the alpha helix. The acidic amino acid, in some embodiments, is an amino acid comprising a side chain sulfonic acid or a side chain carboxylic acid. In a more specific embodiment, the acidic amino acid is selected from the group consisting of Glu, Asp, homoglutamic acid, a sulfonic acid derivative of Cys, cysteic acid, homocysteic acid, Asp, and an alkylated derivative of Cys having the structure of

[chemical structure]

wherein X₅ is C1-C4 alkyl, C2-C4 alkenyl, or C2-C4 alkynyl.

[1002] In a specific embodiment, the Class 5 peptide may comprise the amino acid sequence of any of SEQ ID NOs: 1460-1470, 1473-1478, 1480-1488, 1490-1496, 1503, 1504, 1506, and 1514-1518, or comprising the amino acid sequence of any of Peptides 2-6 of Table 13, Peptides 1-8 of Table 14, and Peptides 2-6, 8, and 9 of Table 15.

TABLE 13
Lactam, Cex glucagon(6-39) peptides and glucagon antagonist and GLP-1 agonist activity

| | | | GLP-1 ECₛₒ | Glu ICₛₒ |
|---|---|---|---|---|
| | | | (nM) | (nM) |
| 1 | E9, K12, E16 | FTSEYSKYLDERRAQDFVQWLMNTGPSSGAPPPS | 1451 | 762 |
| 2 | E9, K12E16(lactam) | FTSEYSKYLDERRAQDFVQWLMNTGPSSGAPPPS | 63 | 2008 |
| 3 | E9, E16K20(lactam) | FTSEYSKYLDERRAKDFVQWLMNTGPSSGAPPPS | 36 | 42 |
| 4 | D9, K12E16(Lactam) | FTSDYSKYLDERRAQDFVQWLMNTGPSSGAPPPS | 118.7 | 828 |
| 5 | [PLA6, E9, K12E16(Lactam) | PLA-TSEYSKYLDERRAQDFVQWLMNTGPSSGAPPPS | 6 | 72 |
| 6 | [PLA6, E9, E16K20(Lactam)] | PLA-TSEYSKYLDERRAKDFVQWLMNTGPSSGAPPPS | 20 | 20 |

TABLE 14
Lactam glucagon(1-29, 2-29, 4-29 and 6-29) peptides and their
glucagon antagonist and GLP-1 agonist activity

| | | | Glucagon |
|---|---|---|---|
| | | GLP-1 EC50 | IC50 |
| | | (nM) | (nM) |
| | Glucagon | | 0.2~1.0* |
| | HSQGTFTSDYSKYLDSRRAQDFVQWLMNT | | |
| | GLP-1 (aa 1-30) | 0.02~0.1 | |
| | HAEGTFTSDVSSYLEGQAAKEFIAW1VKGR | | |
| 1 | [PLA6, D9, E16K20(lactam), D28]G(6-29) | 5~25 | 10~30 |
| | PLA TSDYSKYLDERRAKDFVQWLMDT | | |
| 2 | [PLA6, D9, K12E16(Lactam), D28]G(6-29) | 177 | 63 |
| | PLA TSDYSKYLDERRAQDFVQWLMDT | | |
| 3 | [PLA6, D9, E16, K20E24(Lactam), D28]G(6-29) | 239 | 74 |
| | PLA TSDYSKYLDERRAKDFVEWLMDT | | |
| 4 | [PLA6, D9, E16, E24K28(lactam)]G(6~29) | 289 | 22 |
| | PLA TSDYSKYLDERRAQDFVEWLMKT | | |
| 5 | [E9, E16K20(lactam), D28]G(4~29) | 151 | 10~30 |
| | GTFTSEYSKYLDERRAKDFVQWLMDT | | |
| 6 | [E9, E16K20(lactam), D28]G(2~29) | 203 | 49 (PA) |
| | SQGTFTSEYSKYLDERRAKDFVQWLMDT | | |
| 7 | [A2E3, E16K20(Lactam), D28]G(2~29) | 175 | 63 |
| | AEGTFTSEYSKYLDERRAKDFVQWLMDT | | |
| 8 | [A2E3, E16K20(Lactam), D28]G(1~29) | 0.2 | 130 (PA) |
| | HAEGTFTSEYSKYLDERRAKDFVQWLMDT | | |
| 9 | ANK2 (Bayer peptide) | 0.28 | agonist |
| | HSQGTFTSDY ARYLDARRAREFIKWL VRGRG | | |

*EC50 at glucagon receptor
(PA = partial antagonist)

TABLE 15
Profile of Mixed Agonist/Antagonist
Glucagon (6-CEX) Analogs

| | | | | |
|---|---|---|---|---|
| 1 | E9, K12, E16 | FTSEYSKYLDERRAQDFVQWLMNTGPSSGAPPPS | 1451 | 762 |
| 2 | E9, K12E16(lactam) | FTSEYSKYLDERRAQDFVQWLMNTGPSSGAPPPS | 63 | 2008 |
| 3 | E9, E16K20(lactam) | FTSEYSKYLDERRAKDFVQWLMNTGPSSGAPPPS | 36 | 42 |
| 4 | D9, K12E20(lactam) | FTSDYSKYLDERRAQDFVQWLlMNTGPSSGAPPPS | 18 | 828 |
| 5 | [PLA6, E9, K12E20(lactam) | PLA-TSEYSKYLDERRAQDFVQWLMNTGPSSGAPPPS | 6 | 72 |
| 6 | [PLA6, E9, E16K20(Lactam)] | PLA-TSEYSKYLDERRAKDFVQWLMNTGPSSGAPPPS | 20 | 20 |

Glucagon D⁹(6-29) analogs

| | | | GLP-1 | Glucagon |
|---|---|---|---|---|
| | | | EC50 (nM) | 1050 (nM) |
| 7 | PLA 6, D9, D28 | PLA-TSDYSKYLDSRRAQDFVQWLMDT | −700 | tbd |
| 8 | PLA6, D9, K12E20(Lactam) | PLA-TSDYSKYLDERRAQDFVQWLMDT | 21 | 13 |
| 9 | PLA6, D9, E16K20(lactam) | PLA-TSDYSKYLDERRAKDFVQWLMDT | 4 | 6 |

[1003] In some embodiments, the peptide comprising the general structure A-B-C is a Class peptide. In a specific embodiment, the peptide exhibits at least about 50% of the maximum agonism achieved by native GLP-1 at the GLP-1 receptor and at least about 50% inhibition of the maximum response achieved by native glucagon at the glucagon receptor. In another specific embodiment, the peptide exhibits at least about 55%, at least about 60%, at least about 70%, at least about 80%, at least about 90%, at least about 95%, or about 100% of the maximum agonism achieved by native GLP-1 at the GLP-1 receptor. Alternatively or additionally, the peptide may exhibit at least about 55%, at least about 60%, at least about 70%, at least about 80%, at least about 90%, at least about 95%, or about 100% inhibition of the maximum response achieved by native glucagon at the glucagon receptor.

[1004] In some embodiments, a peptide with Class 5 peptide or conjugate thereof, is provided comprising:

(1) modifications that confer glucagon antagonist activity, including but not limited to:

[1005] (a) substitution of the Phe at position 6 with PLA (according to amino acid numbering of wild type glucagon), optionally with deletion of 1 to 5 amino acids from the N-terminus of wild type glucagon; or

[1006] (b) deletion of 2 to 5 amino acids from the N-terminus of wild type glucagon; optionally with substitution of Asp at position 9 of wild type glucagon with glutamic acid, homoglutamic acid or a sulfonic acid derivative of cysteine (according to amino acid numbering of wild type glucagon); and

(2) modifications that confer GLP-1 agonist activity, including but not limited to:

[1007] (a) insertion or substitution of α, α-disubstituted amino acid within amino acids 12-29 of wild type glucagon, e.g. at one, two, three, four or more of positions 16, 17, 18, 19, 20, 21, 24 or 29 (according to the amino acid numbering of wild type glucagon); or

[1008] (b) introduction of an intramolecular bridge within amino acids 12-29 of wild type glucagon, e.g. a salt bridge or a lactam bridge or another type of covalent bond; or

[1009] (c) substitution of the amino acid at one or more of positions 2, 3, 17, 18, 21, 23, or 24 (according to the amino acid numbering of native glucagon) with the corresponding amino acid of GLP-1, e.g. Ser2 is replaced with Ala, Gln3 is replaced with Glu, Arg17 is replaced with Gln, Arg at position 18 is replaced with Ala, Asp at position 21 is replaced with Glu, Val at position 23 is replaced with Ile, and/or Gln at position 24 is replaced with Ala; or

[1010] (d) other modifications that stabilize the alpha-helix structure around amino acid positions 12-29 according to the amino acid numbering of wild type glucagon; and

(3) other modifications that enhance GLP-1 agonist activity, e.g. a C-terminal amide or ester in place of a C-terminal carboxylate; and optionally
(4) one or more of the following modifications:

[1011] (a) covalent attachment to a hydrophilic moiety, such as polyethylene glycol, e.g. at the N-terminus, or at position 6, 16, 17, 20, 21, 24, 29, 40 or at the C-terminal amino acid; and/or

[1012] (b) acylation or alkylation; and optionally

(5) one or more of the following additional modifications:

[1013] (a) covalent linkage of amino acids, to the N-terminus, e.g. 1-5 amino acids to the N-terminus, optionally via an ester bond to PLA at position 6 (according to the numbering of wild type glucagon), optionally together with modifications at position 1 or 2, e.g. as described herein, that improve resistance to DPP-IV cleavage;

[1014] (b) deletion of amino acids at positions 29 and/or 28, and optionally position 27 (according to the numbering of wild type glucagon);

[1015] (c) covalent linkage of amino acids to the C-terminus;

[1016] (d) non-conservative substitutions, conservative substitutions, additions or deletions while retaining desired activity, for example, conservative substitutions at one or more of positions 2, 5, 7, 10, 11, 12, 13, 14, 16, 17, 18, 19, 20, 21, 24, 27, 28 or 29, substitution of Tyr at position 10 with Val or Phe, substitution of Lys at position 12 with Arg, substitution of one or more of these positions with Ala;

[1017] (e) modification of the aspartic acid at position 15, for example, by substitution with glutamic acid, homoglutamic acid, cysteic acid or homocysteic acid, which may reduce degradation; or modification of the serine at position 16, for example, by substitution of threonine, Aib, glutamic acid or with another negatively charged amino acid having a side chain with a length of 4 atoms, or alternatively with any one of glutamine, homoglutamic acid, or homocysteic acid, which likewise may reduce degradation due to cleavage of the Asp15-Ser16 bond;

[1018] (f) modification of the methionine at position 27, for example, by substitution with leucine or norleucine, to reduce oxidative degradation;

[1019] (g) modification of the Gln at position 20 or 24, e.g. by substitution with Ala or Aib, to reduce degradation that occurs through deamidation of Gln

[1020] (h) modification of Asp at position 21, e.g. by substitution with Glu, to reduce degradation that occurs through dehydration of Asp to form a cyclic succinimide intermediate followed by isomerization to iso-aspartate;

[1021] (j) homodimerization or heterodimerization as described herein; and

[1022] (k) combinations of the above.

[1023] It is understood that any of the modifications within the same class may be combined together and/or modifications of different classes are combined. For example, the modifications of (1)(a) may be combined with (2)(a) and (3); (1)(a) may be combined with (2)(b), e.g. lactam bridge or salt bridge, and (3); (1)(a) may be combined with (2)(c) and (3); (1)(b) may be combined with (2)(a) and (3); (1)(b) may be combined with (2)(b), e.g. lactam bridge or salt bridge, and (3); (1)(b) may be combined with (2)(c) and (3); any of the foregoing may be combined with (4)(a) and/or (4)(b); and any of the foregoing may be combined with any of (5)(a) through (5)(k).

[1024] In exemplary embodiments, the α, α-disubstituted amino acid Aib is substituted at one, two, three or all of positions 16, 20, 21, or 24 (according to the amino acid numbering of wild type glucagon).

[1025] In exemplary embodiments, the intramolecular bridge is a salt bridge.

[1026] In other exemplary embodiments, the intramolecular bridge is a covalent bond, e.g. a lactam bridge. In some embodiments, the lactam bridge is between the amino acids at positions 9 and 12, the amino acids at positions 12 and 16, the amino acids at positions 16 and 20, the amino acids at positions 20 and 24, or the amino acids at positions 24 and 28 (according to the amino acid numbering of SEQ ID NO: 1401).

[1027] In exemplary embodiments, acylation or alkylation is at position 6, 10, 20 or 24 or the N-terminus or C-terminus (according to the amino acid numbering of wild type glucagon) SEQ ID NO: 1401).

[1028] In exemplary embodiments, modifications include:

[1029] (i) substitution of Asp at position 15 (according to the numbering of SEQ ID NO: 1401) with cysteic acid, glutamic acid, homoglutamic acid, and homocysteic acid;

[1030] (ii) substitution of Ser at position 16 (according to the numbering of SEQ ID NO: 1401) with cysteic acid, glutamic acid, homoglutamic acid, and homocysteic acid;

[1031] (iii) substitution of Asn at position 28 with a charged amino acid;

[1032] (iv) substitution of Asn at position 28 with a charged amino acid selected from the group consisting of Lys, Arg, His, Asp, Glu, cysteic acid, and homocysteic acid;

[1033] (v) substitution at position 28 with Asn, Asp, or Glu;

[1034] (vi) substitution at position 28 with Asp;

[1035] (vii) substitution at position 28 with Glu;

[1036] (viii) substitution of Thr at position 29 with a charged amino acid;

[1037] (ix) substitution of Thr at position 29 with a charged amino acid selected from the group consisting of Lys, Arg, His, Asp, Glu, cysteic acid, and homocysteic acid;

[1038] (x) substitution at position 29 with Asp, Glu, or Lys;

[1039] (xi) substitution at position 29 with Glu;

[1040] (xii) insertion of 1-3 charged amino acids after position 29;

[1041] (xiii) insertion after position 29 of Glu or Lys;

[1042] (xiv) insertion after position 29 of Gly-Lys or Lys-Lys;

[1043] or combinations thereof.

[1044] Any of the modifications described above which increase GLP-1 receptor agonist activity, glucagon receptor antagonist activity, peptide solubility, and/or peptide stability can be applied individually or in combination.

### Modification to Enhance Stability

[1045] In accordance with some embodiments the Class 5 peptides disclosed herein can be further modified to include the amino acid sequence of SEQ ID NO: 1421 (GPSSGAPPPS), or SEQ ID NO: 1450, linked to the carboxy terminal amino acid (position 24) of the Class 5 peptide and administered to individuals to induce weight loss or assist in weight maintenance. More particularly, the Class 5 peptide comprises a sequence selected from the group consisting of SEQ ID NO: 1405, SEQ ID NO: 1406, SEQ ID NO: 1407, SEQ ID NO: 1408, SEQ ID NO: 1409, SEQ ID NO: 1412, SEQ ID NO: 1413, SEQ ID NO: 1414, SEQ ID NO: 1416, SEQ ID NO: 1417, SEQ ID NO: 1418, SEQ ID NO: 1419, SEQ ID NO: 1422, SEQ ID NO: 1423, SEQ ID NO: 1424 and SEQ ID NO: 1425 and further comprising the amino acid sequence of SEQ ID NO: 1421 (GPSSGAPPPS), or SEQ ID NO: 1450, linked to the carboxy terminal amino acid (position 24) of the peptide or Class 5 peptide, is used to suppress appetite and inducing weight loss/weight maintenance. In some embodiments the administered peptide or Class 5 peptide comprises a sequence selected from the group consisting of SEQ ID NO: 1416, SEQ ID NO: 1417, SEQ ID NO: 1418 and SEQ ID NO: 1419, further comprising the amino acid sequence of SEQ ID NO: 1421 (GPSSGAPPPS) linked to the carboxy terminal amino acid (position 24) of the Class 5 peptide. In some embodiments the method comprises administering a peptide or Class 5 peptide comprising the sequence of SEQ ID NO: 1445 or SEQ ID NO: 1446.

[1046] Accordingly, it is expected that the Class 5 peptides disclosed herein can be similarly modified to decrease their susceptibility to premature chemical cleavage in aqueous buffers. In accordance with some embodiments the Class 5 peptides described herein can be further modified to enhance their stability in aqueous solutions by replacing the native aspartic amino acid, located at corresponding position 15 of native glucagon, with an amino acid selected from the group consisting of cysteic acid, glutamic acid, homoglutamic acid and homocysteic acid. In accordance with some embodiments the aspartic acid residue at position 10 of class 5 peptide of SEQ ID NO: 1405, SEQ ID NO: 1406, SEQ ID NO: 1407 or SEQ ID NO: 1408 can be substituted with an amino acid selected from the group consisting of cysteic acid, glutamic acid, homoglutamic acid and homocysteic acid, and in some embodiments the native aspartic acid at position 10 of SEQ ID NO: 1405, SEQ ID NO: 1406, SEQ ID NO: 1407 or SEQ ID NO: 1408 is replaced with glutamic acid. In accordance with some embodiments a class 5 peptide having improved stability in aqueous solutions is provided wherein the antagonist comprises a modified sequence of SEQ ID NO: 1409, wherein the modification comprises substitution of the Asp at position 10 of SEQ ID NO: 1409 with Glu. In some embodiments a class 5 peptide is provided comprising a sequence selected form the group consisting of SEQ ID NO: 1422, SEQ ID NO: 1423, SEQ ID NO: 1424 and SEQ ID NO: 1425. In some embodiments the class 5 peptide is amidated.

[1047] The Asp-Ser sequence at position 15-16 of native glucagon has been identified as a uniquely unstable dipeptide that leads to premature chemical cleavage of the native hormone in aqueous buffers. For example, when maintained at 0.01N HCl at 37° C. for 2 weeks, more than 50% of the native glucagon may be cleaved into fragments. The two liberated cleavage peptides 1-15 and 16-29 are devoid of glucagon-like biological activity and thus represent a limitation on the aqueous pre-formulation of glucagon and its related analogs. The selective chemical substitution of the Asp at position 15 of native glucagon with Glu has been observed to virtually eliminate chemical cleavage of the 15-16 peptide bond.

[1048] In yet further exemplary embodiments, any of the foregoing compounds can be further modified to improve stability by modifying the amino acid corresponding to position 15 or 16 of native glucagon, to reduce degradation of the peptide over time, especially in acidic or alkaline buffers.

### Modification to Enhance Solubility

[1049] The class 5 peptide can be further modified to improve the peptide's solubility in aqueous solutions at physiological pH, in certain aspects, while retaining the glucagon antagonist and GLP-1 agonist activity. Introduction of hydrophilic groups at positions corresponding to positions 12, 15, 16, 19 and 24 of the peptide of SEQ ID NO: 1405, or at positions 12, 16, 19 or 24 of the peptide of SEQ ID NO: 1406 can improve the solubility of the resulting peptides in solutions having a physiological pH, while retaining the parent compounds glucagon antagonist and GLP agonist activity. Therefore, in some embodiments the presently disclosed class 5 peptide that are further modified to comprise one or more hydrophilic groups covalently linked to the side chains of amino acids corresponding to amino acid positions 12, 15, 16, 19 and 24 of the peptide of SEQ ID NO: 1405 or SEQ ID NO: 1406. In a further embodiment the side chains of amino acids corresponding to amino acid positions 16 and 19 of SEQ ID NO: 1405 or SEQ ID NO: 1406 are covalently bound to hydrophilic groups, and in some embodiments the hydrophilic group is polyethylene glycol (PEG).

[1050] Class 5 glucagon related peptides can be modified by introducing charge at its carboxy terminus to enhance the solubility of the peptide while retaining the agonist properties of the peptide. The enhanced solubility allows for the preparation and storage of glucagon solutions at near neutral pH. Formulating glucagon solutions at relatively neutral pHs (e.g. pH of about 6.0 to about 8.0) improves the long term stability of the Class 5 peptides.

[1051] Applicants anticipate that class 5 peptides disclosed herein can be similarly modified to enhance their solubility in aqueous solutions at relatively neutral pH (e.g. pH of about 6.0 to about 8.0), in some cases, while retaining a glucagon antagonist and GLP-1 activity. Accordingly, some embodiments is directed to a glucagon antagonist/GLP-1 of SEQ ID NO: 1405, SEQ ID NO: 1406, SEQ ID NO: 1407 or SEQ ID NO: 1408 that has been further modified relative to the native amino acids present at positions 6-29 of the wild type glucagon (SEQ ID NO: 1401) to add charge to the peptide by the substitution of native non-charged amino acids with charged amino acids, or the addition of charged amino acids to the carboxy terminus. In accordance with some embodiments, one to three of the non-charged native amino acids of the class 5 peptides disclosed herein are replaced with a charged amino acid. In some embodiments the charged amino acid is selected from the group consisting of lysine, arginine, histidine, aspartic acid and glutamic acid. More particularly, applicants have discovered that substituting the normally occurring amino acid corresponding to position 28 and/or 29 (relative to native glucagon) with charged amino acids, and/or the addition of one to two charged amino acids at the carboxy terminus of the peptide, enhances the solubility and stability of the Class 5 peptide in aqueous solutions at physiologically relevant pHs (i.e., a pH of about 6.5 to about 7.5). Accordingly such modifications of class 5 peptides are anticipated to have a similar effect on the solubility in aqueous solutions, particularly at a pH ranging from about 5.5 to about 8.0, while retaining the parent peptides biological activity.

[1052] In accordance with some embodiments the class 5 peptide of SEQ ID NO: 1405, SEQ ID NO: 1406, SEQ ID NO: 1407 or SEQ ID NO: 1408 is modified by the substitution of the native amino acid at position 23 and/or 24 of those sequences with a negatively charged amino acid (e.g., aspartic acid or glutamic acid) and optionally the addition of a negatively charged amino acid (e.g., aspartic acid or glutamic acid) to the carboxy terminus of the peptide. In an alternative embodiment a class 5 peptide comprising SEQ ID NO: 1405, SEQ ID NO: 1406, SEQ ID NO: 1407 or SEQ ID NO: 1408 is modified by the substitution of the native amino acid at position 24 of SEQ ID NO: 1405, SEQ ID NO: 1406, SEQ ID NO: 1407 or SEQ ID NO: 1408 with a positively charged amino acid (e.g., lysine, arginine or histidine) and optionally the addition of one or two positively charged amino acid (e.g., lysine, arginine or histidine) on the carboxy terminus of the peptide. In accordance with some embodiments a class 5 peptide having improved solubility and stability is provided wherein the analog comprises the amino acid sequence of SEQ ID NO: 1415 or SEQ ID NO: 1451 with the proviso that at least one amino acids at position, 23, or 24 of SEQ ID NO: 1415 or SEQ ID NO: 1451 is substituted with an acidic amino acid and/or an additional acidic amino acid added at the carboxy terminus of SEQ ID NO: 1415 or SEQ ID NO: 1451. In some embodiments the acidic amino acids are independently selected from the group consisting of Asp, Glu, cysteic acid and homocysteic acid.

[1053] In accordance with some embodiments a class 5 peptide having improved solubility and stability is provided wherein the antagonist comprises the amino acid sequence of SEQ ID NO: 1416, SEQ ID NO: 1417, SEQ ID NO: 1418 or SEQ ID NO: 1419. In accordance with some embodiments a glucagon agonist is provided comprising the sequence of SEQ ID NO: 1416 or SEQ ID NO: 1417. In some embodiments the class 5 peptide comprises the sequence of SEQ ID NO: 1420.

[1054] In accordance with some embodiments a class 5 peptide is provided comprising the sequence of SEQ ID NO: 1415 or SEQ ID NO: 1451. In some embodiments, position 4 of SEQ ID NO: 1415 or SEQ ID NO: 1451 is aspartic acid, glutamic acid, homoglutamic acid, cysteic acid or homocysteic acid, and in some embodiments position 4 is aspartic acid, glutamic acid, cysteic acid or homocysteic acid, and in a further embodiment position 4 of SEQ ID NO: 1415 or SEQ ID NO: 1451 is aspartic acid or glutamic acid, and in some embodiments position 4 of SEQ ID NO: 1415 or SEQ ID NO: 1451 is aspartic acid. In some embodiments a class 5 peptide is provided comprising the sequence of SEQ ID NO: 1415 or SEQ ID NO: 1451 wherein position 4 of SEQ ID NO: 1415 is aspartic acid and position 10 of SEQ ID NO: 1415 is glutamic acid. In a further embodiment the C-terminal amino acid of SEQ ID NO: 1415 or SEQ ID NO: 1451 is modified to replace the native carboxylic acid group with a charge-neutral group, such as an amide or ester.

### Class 5 Peptide Fusions

[1055] In a further embodiment, the carboxy terminal amino acid of the Class 5 peptide described herein is covalently bound to a second peptide comprising a sequence selected from the group consisting of SEQ ID NOs: 1421, 1426, 1427, and 1450. For example, in some embodiments, the Class 5 peptide of SEQ ID NO: 1415, SEQ ID NO: 1451, SEQ ID NO: 1405, SEQ ID NO: 1406, SEQ ID NO: 1407, SEQ ID NO: 1408, SEQ ID NO: 1412, SEQ ID NO: 1413, SEQ ID NO: 1414, SEQ ID NO: 1416, SEQ ID NO: 1417, SEQ ID NO: 1418, SEQ ID NO: 1419, SEQ ID NO: 1422, SEQ ID NO: 1423, SEQ ID NO: 1424 and SEQ ID NO: 1425 is covalently bound to a second peptide comprising a sequence selected from the group consisting of SEQ ID NO: 1421 (GPSSGAPPPS), SEQ ID NO: 1426 (KRNRNNIA), SEQ ID NO: 1427 (KRNR) and SEQ ID NO: 1450 (GPSSGAPPPSX).

[1056] In some embodiments a class 5 peptide dimer is provided comprising two sequences independently selected from the group consisting of SEQ ID NO: 1405, SEQ ID NO: 1406, SEQ ID NO: 1407, SEQ ID NO: 1408, SEQ ID NO: 1409, SEQ ID NO: 1422, SEQ ID NO: 1423, SEQ ID NO: 1424 and SEQ ID NO: 1425 that further comprises an amino acid sequence of SEQ ID NO: 1421 (GPSSGAPPPS) linked to the carboxy terminal amino acid of the class 5 peptide.

[1057] In some embodiments, the class 5 peptide is further modified by truncation or deletion of one or two amino acids of the C-terminus of the peptide (i.e., truncation of the amino acid at position 29 or at positions 28 and 29 of native glucagon). Preferably truncation does not effect activity (e.g., glucagon antagonism/GLP-1 agonism) of a class 5 peptide.

### Class 5 Peptide Conjugates

[1058] Conjugates of Class 5 peptides are also provided, in which the glucagon peptide is linked, optionally via covalent bonding and optionally via a linker, to a conjugate moiety.

[1059] In those embodiments wherein the class 5 peptide comprises a polyethylene glycol chain, the polyethylene glycol chain may be in the form of a straight chain or it may be branched. In accordance with some embodiments the polyethylene glycol chain has an average molecular weight selected from the range of about 500 to about 10,000 Daltons. In some embodiments the polyethylene glycol chain has an average molecular weight selected from the range of about 1,000 to about 5,000 Daltons. In some embodiments the polyethylene glycol chain has an average molecular weight selected from the range of about 1,000 to about 5,000 Daltons. In some embodiments the polyethylene glycol chain has an average molecular weight selected of about 1,000 to about 2,000 Daltons. In some embodiments the polyethylene glycol chain has an average molecular weight of about 1,000 Daltons.

[1060] In some embodiments the pegylated class 5 peptide comprises a peptide consisting of the sequence of SEQ ID NO: 1415 or SEQ ID NO: 1451 wherein the polyethylene glycol chain is linked to an amino acid selected from positions 11, 12, 15, 16, 19 and 24 of SEQ ID NO: 1415 or SEQ ID NO: 1451, and the molecular weight of the PEG chain is about 1,000 to about 5,000 Daltons. In some embodiments the pegylated class 5 peptide comprises a peptide consisting of the sequence of SEQ ID NO: 1415 or SEQ ID NO: 1451 wherein the polyethylene glycol chain is linked to the amino acid at position 16 or 19 of SEQ ID NO: 1415 or SEQ ID NO: 1451, and the molecular weight of the PEG chain is about 1,000 to about 5,000 Daltons. In a further embodiment the modified class 5 peptide comprises two or more polyethylene glycol chains covalently bound to the peptide wherein the total molecular weight of the glucagon chains is about 1,000 to about 5,000 Daltons. In some embodiments the class 5 peptide comprises the sequence of SEQ ID NO: 1415 or SEQ ID NO: 1451 wherein a polyethylene glycol chain is linked to the amino acid at positions 16 and 19 of SEQ ID NO: 1415 or SEQ ID NO: 1451 and the combined molecular weight of the two PEG chains is about 1,000 to about 5,000 Daltons.

[1061] The class 5 glucagon related peptide may comprise the amino acid sequence of any of SEQ ID NOs: 1401-1518, optionally with up to 1, 2, 3, 4, or 5 further modifications that retain glucagon antagonist and GLP-1 agonist activity.

### The Linking Group (L)

[1062] As described herein, the present disclosures provide glucagon superfamily peptides conjugated with GPCR ligands having the formula Q-L-Y, wherein L is a linking group or a chemical bond. In some embodiments, L is stable in vivo. In some embodiments, L is hydrolyzable in vivo. In some embodiments, L is metastable in vivo.

[1063] Q and Y can be linked together through L using standard linking agents and procedures known to those skilled in the art. In some aspects, Q and Y are fused directly and L is a bond. In other aspects, Q and Y are fused through a linking group L. For example, in some embodiments, Q and Y are linked together via a peptide bond, optionally through a peptide or amino acid spacer. In some embodiments, Q and Y are linked together through chemical conjugation, optionally through a linking group (L). In some embodiments, L is directly conjugated to each of Q and Y.

[1064] Chemical conjugation can occur by reacting a nucleophilic reactive group of one compound to an electrophilic reactive group of another compound. In some embodiments when L is a bond, Q is conjugated to Y either by reacting a nucleophilic reactive moiety on Q with an electrophilic reactive moiety on Y, or by reacting an electrophilic reactive moiety on Q with a nucleophilic reactive moiety on Y. In embodiments when L is a group that links Q and Y together, Q and/or Y can be conjugated to L either by reacting a nucleophilic reactive moiety on Q and/or Y with an electrophilic reactive moiety on L, or by reacting an electrophilic reactive moiety on Q and/or Y with a nucleophilic reactive moiety on L. Nonlimiting examples of nucleophilic reactive groups include amino, thiol, and hydroxyl. Nonlimiting examples of electrophilic reactive groups include carboxyl, acyl chloride, anhydride, ester, succinimide ester, alkyl halide, sulfonate ester, maleimido, haloacetyl, and isocyanate. In embodiments where Q and Y are conjugated together by reacting a carboxylic acid with an amine, an activating agent can be used to form an activated ester of the carboxylic acid.

[1065] The activated ester of the carboxylic acid can be, for example, N-hydroxysuccinimide (NHS), tosylate (Tos), mesylate, triflate, a carbodiimide, or a hexafluorophosphate. In some embodiments, the carbodiimide is 1,3-dicyclohexylcarbodiimide (DCC), 1,1′-carbonyldiimidazole (CDI), 1-ethyl-3-(3-dimethylaminopropyl)carbodiimide hydrochloride (EDC), or 1,3-diisopropylcarbodiimide (DICD). In some embodiments, the hexafluorophosphate is selected from a group consisting of hexafluorophosphate benzotriazol-1-yl-oxy-tris(dimethylamino)phosphonium hexafluorophosphate (BOP), benzotriazol-1-yl-oxytripyrrolidinophosphonium hexafluorophosphate (PyBOP), 2-(1H-7-azabenzotriazol-1-yl)-1,1,3,3-tetramethyl uronium hexafluorophosphate (HATU), and o-benzotriazole-N,N,N′,N′-tetramethyl-uronium-hexafluoro-phosphate (HBTU).

[1066] In some embodiments, Q comprises a nucleophilic reactive group (e.g. the amino group, thiol group, or hydroxyl group of the side chain of lysine, cysteine or serine) that is capable of conjugating to an electrophilic reactive group on Y or L. In some embodiments, Q comprises an electrophilic reactive group (e.g. the carboxylate group of the side chain of Asp or Glu) that is capable of conjugating to a nucleophilic reactive group on Y or L. In some embodiments, Q is chemically modified to comprise a reactive group that is capable of conjugating directly to Y or to L. In some embodiments, Q is modified at the C-terminal to comprise a natural or nonnatural amino acid with a nucleophilic side chain, such as an amino acid represented by Formula I, Formula II, or Formula III, as previously described herein (see Acylation and alkylation). In exemplary embodiments, the C-terminal amino acid of Q is selected from the group consisting of lysine, ornithine, serine, cysteine, and homocysteine. For example, the C-terminal amino acid of Q can be modified to comprise a lysine residue. In some embodiments, Q is modified at the C-terminal amino acid to comprise a natural or nonnatural amino acid with an electrophilic side chain such as, for example, Asp and Glu. In some embodiments, an internal amino acid of Q is substituted with a natural or nonnatural amino acid having a nucleophilic side chain, such as an amino acid represented by Formula I, Formula II, or Formula III, as previously described herein (see Acylation and alkylation). In exemplary embodiments, the internal amino acid of Q that is substituted is selected from the group consisting of lysine, ornithine, serine, cysteine, and homocysteine. For example, an internal amino acid of Q can be substituted with a lysine residue. In some embodiments, an internal amino acid of Q is substituted with a natural or nonnatural amino acid with an electrophilic side chain, such as, for example, Asp and Glu.

[1067] In some embodiments, Y comprises a reactive group that is capable of conjugating directly to Q or to L. In some embodiments, Y comprises a nucleophilic reactive group (e.g. amine, thiol, hydroxyl) that is capable of conjugating to an electrophilic reactive group on Q or L. In some embodiments, Y comprises electrophilic reactive group (e.g. carboxyl group, activated form of a carboxyl group, compound with a leaving group) that is capable of conjugating to a nucleophilic reactive group on Q or L. In some embodiments, Y is chemically modified to comprise either a nucleophilic reactive group that is capable of conjugating to an electrophilic reactive group on Q or L. In some embodiments, Y is chemically modified to comprise an electrophilic reactive group that is capable of conjugating to a nucleophilic reactive group on Q or L.

[1068] In some embodiments, conjugation can be carried out through organosilanes, e,g, aminosilane treated with glutaraldehyde; carbonyldiimidazole (CDI) activation of silanol groups; or utilization of dendrimers. A variety of dendrimers are known in the art and include poly (amidoamine) (PAMAM) dendrimers, which are synthesized by the divergent method starting from ammonia or ethylenediamine initiator core reagents; a sub-class of PAMAM dendrimers based on a tris-aminoethylene-imine core; radially layered poly(amidoamine-organosilicon) dendrimers (PAMAMOS), which are inverted unimolecular micelles that consist of hydrophilic, nucleophilic polyamidoamine (PAMAM) interiors and hydrophobic organosilicon (OS) exteriors; Poly (Propylene Imine) (PPI) dendrimers, which are generally poly-alkyl amines having primary amines as end groups, while the dendrimer interior consists of numerous of tertiary tris-propylene amines; Poly (Propylene Amine) (POPAM) dendrimers; Diaminobutane (DAB) dendrimers; amphiphilic dendrimers; micellar dendrimers which are unimolecular micelles of water soluble hyper branched polyphenylenes; polylysine dendrimers; and dendrimers based on poly-benzyl ether hyper branched skeleton.

[1069] In some embodiments, conjugation can be carried out through olefin metathesis. In some embodiments, Y and Q, Y and L, or Q and L both comprise an alkene or alkyne moiety that is capable of undergoing metathesis. In some embodiments a suitable catalyst (e.g. copper, ruthenium) is used to accelerate the metathesis reaction. Suitable methods of performing olefin metathesis reactions are described in the art. See, for example, Schafineister et al., J. Am. Chem. Soc. 122: 5891-5892 (2000), Walensky et al., Science 305: 1466-1470 (2004), and Blackwell et al., Angew, Chem., Int. Ed. 37: 3281-3284 (1998).

[1070] In some embodiments, conjugation can be carried out using click chemistry. A “click reaction” is wide in scope and easy to perform, uses only readily available reagents, and is insensitive to oxygen and water. In some embodiments, the click reaction is a cycloaddition reaction between an alkynyl group and an azido group to form a triazolyl group. In some embodiments, the click reaction uses a copper or ruthenium catalyst. Suitable methods of performing click reactions are described in the art. See, for example, Kolb et al., Drug Discovery Today 8:1128 (2003); Kolb et al., Angew. Chem. Int. Ed. 40:2004 (2001); Rostovtsev et al., Angew. Chem. Int. Ed. 41:2596 (2002); Tornoe et al., J. Org. Chem. 67:3057 (2002); Manetsch et al., J. Am. Chem. Soc. 126:12809 (2004); Lewis et al., Angew. Chem. Int. Ed. 41:1053 (2002); Speers, J. Am. Chem. Soc. 125:4686 (2003); Chan et al. Org. Lett. 6:2853 (2004); Zhang et al., J. Am. Chem. Soc. 127:15998 (2005); and Waser et al., J. Am. Chem. Soc. 127:8294 (2005).

[1071] Indirect conjugation via high affinity specific binding partners, e.g. streptavidin/biotin or avidin/biotin or lectin/carbohydrate is also contemplated.

Chemical Modification of Q and/or Y

[1072] In some embodiments, Q and/or Y are functionalized to comprise a nucleophilic reactive group or an electrophilic reactive group with an organic derivatizing agent. This derivatizing agent is capable of reacting with selected side chains or the N- or C-terminal residues of targeted amino acids on Q and functional groups on Y. Reactive groups on Q and/or Y include, e.g., aldehyde, amino, ester, thiol, α-haloacetyl, maleimido or hydrazino group. Derivatizing agents include, for example, maleimidobenzoyl sulfosuccinimide ester (conjugation through cysteine residues), N-hydroxysuccinimide (through lysine residues), glutaraldehyde, succinic anhydride or other agents known in the art. Alternatively, Q and/or Y can be linked to each other indirectly through intermediate carriers, such as polysaccharide or polypeptide carriers. Examples of polysaccharide carriers include aminodextran. Examples of suitable polypeptide carriers include polylysine, polyglutamic acid, polyaspartic acid, co-polymers thereof, and mixed polymers of these amino acids and others, e.g., serines, to confer desirable solubility properties on the resultant loaded carrier.

[1073] Cysteinyl residues most commonly are reacted with α-haloacetates (and corresponding amines), such as chloroacetic acid or chloroacetamide, to give carboxymethyl or carboxyamidomethyl derivatives. Cysteinyl residues also are derivatized by reaction with bromotrifluoroacetone, alpha-bromo-β-(5-imidozoyl)propionic acid, chloroacetyl phosphate, N-alkylmaleimides, 3-nitro-2-pyridyl disulfide, methyl 2-pyridyl disulfide, p-chloromercuribenzoate, 2-chloromercuri-4-nitrophenol, or chloro-7-nitrobenzo-2-oxa-1,3-diazole.

[1074] Histidyl residues are derivatized by reaction with diethylpyrocarbonate at pH 5.5-7.0 because this agent is relatively specific for the histidyl side chain. Para-bromophenacyl bromide also is useful; the reaction is preferably performed in 0.1 M sodium cacodylate at pH 6.0.

[1075] Lysinyl and amino-terminal residues are reacted with succinic or other carboxylic acid anhydrides. Derivatization with these agents has the effect of reversing the charge of the lysinyl residues. Other suitable reagents for derivatizing alpha-amino-containing residues include imidoesters such as methyl picolinimidate, pyridoxal phosphate, pyridoxal, chloroborohydride, trinitrobenzenesulfonic acid, O-methylisourea, 2,4-pentanedione, and transaminase-catalyzed reaction with glyoxylate.

[1076] Arginyl residues are modified by reaction with one or several conventional reagents, among them phenylglyoxal, 2,3-butanedione, 1,2-cyclohexanedione, and ninhydrin. Derivatization of arginine residues requires that the reaction be performed in alkaline conditions because of the high pKa of the guanidine functional group. Furthermore, these reagents may react with the groups of lysine as well as the arginine epsilon-amino group.

[1077] The specific modification of tyrosyl residues may be made, with particular interest in introducing spectral labels into tyrosyl residues by reaction with aromatic diazonium compounds or tetranitromethane. Most commonly, N-acetylimidizole and tetranitromethane are used to form O-acetyl tyrosyl species and 3-nitro derivatives, respectively.

[1078] Carboxyl side groups (aspartyl or glutamyl) are selectively modified by reaction with carbodiimides (R—N═C═N—R¹), where R and R′ are different alkyl groups, such as 1-cyclohexyl-3-(2-morpholinyl-4-ethyl) carbodiimide or 1-ethyl-3-(4-azonia-4,4-dimethylpentyl) carbodiimide. Furthermore, aspartyl and glutamyl residues are converted to asparaginyl and glutaminyl residues by reaction with ammonium ions.

[1079] Other modifications include hydroxylation of proline and lysine, phosphorylation of hydroxyl groups of seryl or threonyl residues, methylation of the alpha-amino groups of lysine, arginine, and histidine side chains (T. E. Creighton, Proteins: Structure and Molecular Properties, W.H. Freeman & Co., San Francisco, pp. 79-86 (1983)), deamidation of asparagine or glutamine, acetylation of the N-terminal amine, and/or amidation or esterification of the C-terminal carboxylic acid group.

[1080] Another type of covalent modification involves chemically or enzymatically coupling glycosides to the peptide. Sugar(s) may be attached to (a) arginine and histidine, (b) free carboxyl groups, (c) free sulfhydryl groups such as those of cysteine, (d) free hydroxyl groups such as those of serine, threonine, or hydroxyproline, (e) aromatic residues such as those of tyrosine, or tryptophan, or (f) the amide group of glutamine. These methods are described in WO87/05330 published 11 Sep. 1987, and in Aplin and Wriston, CRC Crit. Rev. Biochem., pp. 259-306 (1981).

### Structure of L

[1081] In some embodiments, L is a bond. In these embodiments, Q and Y are conjugated together by reacting a nucleophilic reactive moiety on Q with and electrophilic reactive moiety on Y. In alternative embodiments, Q and Y are conjugated together by reacting an electrophilic reactive moiety on Q with a nucleophilic moiety on Y. In exemplary embodiments, L is an amide bond that forms upon reaction of an amine on Q (e.g. an ε-amine of a lysine residue) with a carboxyl group on Y. In alternative embodiments, Q and or Y are derivatized with a derivatizing agent before conjugation.

[1082] In some embodiments, L is a linking group. In some embodiments, L is a bifunctional linker and comprises only two reactive groups before conjugation to Q and Y. In embodiments where both Q and Y have electrophilic reactive groups, L comprises two of the same or two different nucleophilic groups (e.g. amine, hydroxyl, thiol) before conjugation to Q and Y. In embodiments where both Q and Y have nucleophilic reactive groups, L comprises two of the same or two different electrophilic groups (e.g. carboxyl group, activated form of a carboxyl group, compound with a leaving group) before conjugation to Q and Y. In embodiments where one of Q or Y has a nucleophilic reactive group and the other of Q or Y has an electrophilic reactive group, L comprises one nucleophilic reactive group and one electrophilic group before conjugation to Q and Y.

[1083] L can be any molecule with at least two reactive groups (before conjugation to Q and Y) capable of reacting with each of Q and Y. In some embodiments L has only two reactive groups and is bifunctional. L (before conjugation to the peptides) can be represented by Formula VI:

[chemical structure]

wherein A and B are independently nucleophilic or electrophilic reactive groups. In some embodiments A and B are either both nucleophilic groups or both electrophilic groups. In some embodiments one of A or B is a nucleophilic group and the other of A or B is an electrophilic group. Nonlimiting combinations of A and B are shown below.

| Both Nucleophilic | | Both Electrophilic | | Nucleophilic/Electrophilic | |
|---|---|---|---|---|---|
| A | B | A | B | A | B |
| amino | Amino | carboxyl | carboxyl | amino | carboxyl |
| amino | Thiol | carboxyl | acyl chloride | amino | acyl chloride |
| amino | hydroxyl | carboxyl | anhydride | amino | anhydride |
| thiol | Amino | carboxyl | Ester | amino | ester |
| thiol | Thiol | carboxyl | NHS | amino | NHS |
| thiol | hydroxyl | carboxyl | Halogen | amino | halogen |
| hydroxyl | Amino | carboxyl | sulfonate ester | amino | sulfonate ester |
| hydroxyl | Thiol | carboxyl | maleimido | amino | maleimido |
| hydroxyl | hydroxyl | carboxyl | haloacetyl | amino | haloacetyl |
| | | carboxyl | isocyanate | amino | isocyanate |
| | | acyl chloride | carboxyl | thiol | carboxyl |
| | | acyl chloride | acyl chloride | thiol | acyl chloride |
| | | acyl chloride | anhydride | thiol | anhydride |
| | | acyl chloride | Ester | thiol | ester |
| | | acyl chloride | NHS | thiol | NHS |
| | | acyl chloride | Halogen | thiol | halogen |
| | | acyl chloride | sulfonate ester | thiol | sulfonate ester |
| | | acyl chloride | maleimido | thiol | maleimido |
| | | acyl chloride | haloacetyl | thiol | haloacetyl |
| | | acyl chloride | isocyanate | thiol | isocyanate |
| | | anhydride | carboxyl | hydroxyl | carboxyl |
| | | anhydride | acyl chloride | hydroxyl | acyl chloride |
| | | anhydride | anhydride | hydroxyl | anhydride |
| | | anhydride | Ester | hydroxyl | ester |
| | | anhydride | NHS | hydroxyl | NHS |
| | | anhydride | Halogen | hydroxyl | halogen |
| | | anhydride | sulfonate ester | hydroxyl | sulfonate ester |
| | | anhydride | maleimido | hydroxyl | maleimido |
| | | anhydride | haloacetyl | hydroxyl | haloacetyl |
| | | anhydride | isocyanate | hydroxyl | isocyanate |
| | | ester | carboxyl | | |
| | | ester | acyl chloride | | |
| | | ester | anhydride | | |
| | | ester | Ester | | |
| | | ester | NHS | | |
| | | ester | Halogen | | |
| | | ester | sulfonate ester | | |
| | | ester | maleimido | | |
| | | ester | haloacetyl | | |
| | | ester | isocyanate | | |
| | | NHS | carboxyl | | |
| | | NHS | acyl chloride | | |
| | | NHS | anhydride | | |
| | | NHS | Ester | | |
| | | NHS | NHS | | |
| | | NHS | Halogen | | |
| | | NHS | sulfonate ester | | |
| | | NHS | maleimido | | |
| | | NHS | haloacetyl | | |
| | | NHS | isocyanate | | |
| | | halogen | carboxyl | | |
| | | halogen | acyl chloride | | |
| | | halogen | anhydride | | |
| | | halogen | Ester | | |
| | | halogen | NHS | | |
| | | halogen | Halogen | | |
| | | halogen | sulfonate ester | | |
| | | halogen | maleimido | | |
| | | halogen | haloacetyl | | |
| | | halogen | isocyanate | | |
| | | sulfonate ester | carboxyl | | |
| | | sulfonate ester | acyl chloride | | |
| | | sulfonate ester | anhydride | | |
| | | sulfonate ester | Ester | | |
| | | sulfonate ester | NHS | | |
| | | sulfonate ester | Halogen | | |
| | | sulfonate ester | sulfonate ester | | |
| | | sulfonate ester | maleimido | | |
| | | sulfonate ester | haloacetyl | | |
| | | sulfonate ester | isocyanate | | |
| | | maleimido | carboxyl | | |
| | | maleimido | acyl chloride | | |
| | | maleimido | anhydride | | |
| | | maleimido | Ester | | |
| | | maleimido | NHS | | |
| | | maleimido | Halogen | | |
| | | maleimido | sulfonate ester | | |
| | | maleimido | maleimido | | |
| | | maleimido | haloacetyl | | |
| | | maleimido | isocyanate | | |
| | | haloacetyl | carboxyl | | |
| | | haloacetyl | acyl chloride | | |
| | | haloacetyl | anhydride | | |
| | | haloacetyl | Ester | | |
| | | haloacetyl | NHS | | |
| | | haloacetyl | Halogen | | |
| | | haloacetyl | sulfonate ester | | |
| | | haloacetyl | maleimido | | |
| | | haloacetyl | haloacetyl | | |
| | | haloacetyl | isocyanate | | |
| | | isocyanate | carboxyl | | |
| | | isocyanate | acyl chloride | | |
| | | isocyanate | anhydride | | |
| | | isocyanate | Ester | | |
| | | isocyanate | NHS | | |
| | | isocyanate | Halogen | | |
| | | isocyanate | sulfonate ester | | |
| | | isocyanate | maleimido | | |
| | | isocyanate | haloacetyl | | |
| | | isocyanate | isocyanate | | |

In some embodiments, A and B may include alkene and/or alkyne functional groups that are suitable for olefin metathesis reactions. In some embodiments, A and B include moieties that are suitable for click chemistry (e.g. alkene, alkynes, nitriles, azides). Other nonlimiting examples of reactive groups (A and B) include pyridyldithiol, aryl azide, diazirine, carbodiimide, and hydrazide.

[1084] In some embodiments, L is hydrophobic. Hydrophobic linkers are known in the art. See, e.g., Bioconjugate Techniques, G. T. Hermanson (Academic Press, San Diego, Calif., 1996), which is incorporated by reference in its entirety. Suitable hydrophobic linking groups known in the art include, for example, 8-hydroxyoctanoic acid and 8-mercaptooctanoic acid. Before conjugation to the peptides of the composition, the hydrophobic linking group comprises at least two reactive groups (A and B), as described herein and as shown below:

[chemical structure]

[1085] In some embodiments, the hydrophobic linking group comprises either a maleimido or an iodoacetyl group and either a carboxylic acid or an activated carboxylic acid (e.g. NHS ester) as the reactive groups. In these embodiments, the maleimido or iodoacetyl group can be coupled to a thiol moiety on Q or Y and the carboxylic acid or activated carboxylic acid can be coupled to an amine on Q or Y with or without the use of a coupling reagent. Any coupling agent known to one skilled in the art can be used to couple the carboxylic acid with the free amine such as, for example, DCC, DIC, HATU, HBTU, TBTU, and other activating agents described herein. In specific embodiments, the hydrophilic linking group comprises an aliphatic chain of 2 to 100 methylene groups wherein A and B are carboxyl groups or derivatives thereof (e.g. succinic acid). In other specific embodiments the L is iodoacetic acid.

[chemical structure]

[1086] In some embodiments, the linking group is hydrophilic such as, for example, polyalkylene glycol. Before conjugation to the peptides of the composition, the hydrophilic linking group comprises at least two reactive groups (A and B), as described herein and as shown below:

[chemical structure]

In specific embodiments, the linking group is polyethylene glycol (PEG). The PEG in certain embodiments has a molecular weight of about 100 Daltons to about 10,000 Daltons, e.g. about 500 Daltons to about 5000 Daltons. The PEG in some embodiments has a molecular weight of about 10,000 Daltons to about 40,000 Daltons.

[1087] In some embodiments, the hydrophilic linking group comprises either a maleimido or an iodoacetyl group and either a carboxylic acid or an activated carboxylic acid (e.g. NHS ester) as the reactive groups. In these embodiments, the maleimido or iodoacetyl group can be coupled to a thiol moiety on Q or Y and the carboxylic acid or activated carboxylic acid can be coupled to an amine on Q or Y with or without the use of a coupling reagent. Any appropriate coupling agent known to one skilled in the art can be used to couple the carboxylic acid with the amine such as, for example, DCC, DIC, HATU, HBTU, TBTU, and other activating agents described herein In some embodiments, the linking group is maleimido-PEG(20 kDa)-COOH, iodoacetyl-PEG(20 kDa)-COOH, maleimido-PEG(20 kDa)-NHS, or iodoacetyl-PEG(20 kDa)-NHS.

[1088] In some embodiments, the linking group is comprised of an amino acid, a dipeptide, a tripeptide, or a polypeptide, wherein the amino acid, dipeptide, tripeptide, or polypeptide comprises at least two activating groups, as described herein. In some embodiments, the linking group (L) comprises a moiety selected from the group consisting of: amino, ether, thioether, maleimido, disulfide, amide, ester, thioester, alkene, cycloalkene, alkyne, trizoyl, carbamate, carbonate, cathepsin B-cleavable, and hydrazone.

[1089] In some embodiments, L comprises a chain of atoms from 1 to about 60, or 1 to 30 atoms or longer, 2 to 5 atoms, 2 to 10 atoms, 5 to 10 atoms, or 10 to 20 atoms long. In some embodiments, the chain atoms are all carbon atoms. In some embodiments, the chain atoms in the backbone of the linker are selected from the group consisting of C, O, N, and S. Chain atoms and linkers may be selected according to their expected solubility (hydrophilicity) so as to provide a more soluble conjugate. In some embodiments, L provides a functional group that is subject to cleavage by an enzyme or other catalyst or hydrolytic conditions found in the target tissue or organ or cell. In some embodiments, the length of L is long enough to reduce the potential for steric hindrance.

### Stability of L In Vivo

[1090] In some embodiments, L is stable in vivo. In some embodiments, L is stable in blood serum for at least 5 minutes, e.g. less than 25%, 20%, 15%, 10% or 5% of the conjugate is cleaved when incubated in serum for a period of 5 minutes. In other embodiments, L is stable in blood serum for at least 10, or 20, or 25, or 30, or 60, or 90, or 120 minutes, or 3, 4, 5, 6, 7, 8, 9, 10, 12, 15, 18 or 24 hours. In these embodiments, L does not comprise a functional group that is capable of undergoing hydrolysis in vivo. In some exemplary embodiments, L is stable in blood serum for at least about 72 hours.

[1091] In some embodiments, L is hydrolyzable in vivo. In these embodiments, L comprises a functional group that is capable of undergoing hydrolysis in vivo. Nonlimiting examples of functional groups that are capable of undergoing hydrolysis in vivo include esters, anhydrides, and thioesters. For example the following compound is capable of undergoing hydrolysis in vivo because it comprises an ester group:

[chemical structure]

[1092] In some exemplary embodiments L is labile and undergoes substantial hydrolysis within 3 hours in blood plasma at 37° C., with complete hydrolysis within 6 hours. In some exemplary embodiments, L is not labile.

[1093] Nonlimiting examples of functional groups that are not capable of undergoing significant hydrolysis in vivo include amides, ethers, and thioethers. For example, the following compound is not capable of undergoing significant hydrolysis in vivo:

[chemical structure]

[1094] In some embodiments, L is metastable in vivo. In these embodiments, L comprises a functional group that is capable of being chemically or enzymatically cleaved in vivo (e.g., an acid-labile, reduction-labile, or enzyme-labile functional group), optionally over a period of time. In these embodiments, L can comprise, for example, a hydrazone moiety, a disulfide moiety, or a cathepsin-cleavable moiety. When L is metastable, and without intending to be bound by any particular theory, the Q-L-Y conjugate is stable in an extracellular environment, e.g., stable in blood serum for the time periods described above, but labile in the intracellular environment or conditions that mimic the intracellular environment, so that it cleaves upon entry into a cell. In some embodiments when L is metastable, L is stable in blood serum for at least about 24, 25, 26, 27, 28, 29, 30, 31, 32, 33, 34, 35, 36, 42, or 48 hours, for example, at least about 48, 54, 60, 66, or 72 hours, or about 24-48, 48-72, 24-60, 36-48, 36-72, or 48-72 hours.

[1095] Q-L-Y Conjugates

### Conjugation of Q and Y

[1096] Conjugation of Q to Y through L can be carried out an any position within Q, including any of positions 1-29, a position within a C-terminal extension, or the C-terminal amino acid, provided that the activity of Q is retained, if not enhanced. Nonlimiting examples include positions 5, 7, 10, 11, 12, 13, 14, 15, 16, 17, 18, 19, 20, 21, 24, 27, 28, 29, 30, 37, 38, 39, 40, 41, 42, or 43 (according to the number of the amino acids of SEQ ID NO: 1601). In some embodiments, Y is conjugated to Q through L at one or more of positions 10, 20, 24, 30, 37, 38, 39, 40, 41, 32, or 43. In specific embodiments, Y is conjugated to Q through L at position 10 and/or 40 of Q.

### Activity

### Activity at the Glucagon Receptor and the GPCR

[1097] In some embodiments, Q-L-Y exhibits activity at both the glucagon receptor and a GPCR. In some embodiments, the activity (e.g., the EC₅₀ or the relative activity or potency) of Q at the glucagon receptor is within about 100-fold, about 75-fold, about 60-fold, about 50-fold, about 40-fold, about 30-fold, about 20-fold, about 10-fold, or about 5 fold different (higher or lower) from the activity (e.g., the EC₅₀ or the relative activity or potency) of Y at a GPCR. In some embodiments, the glucagon potency of Q is within about 25-, about 20-, about 15-, about 10-, or about 5-fold different (higher or lower) from the potency of Y.

[1098] In some embodiments, the ratio of the relative activity or the EC₅₀ or the potency of the Q at the glucagon receptor divided by the relative activity or the EC₅₀ or potency of Y at a GPCR is less than, or is about, X, wherein X is selected from 100, 75, 60, 50, 40, 30, 20, 15, 10, or 5. In some embodiments, the ratio of the EC₅₀ or potency or relative activity of Q at the glucagon receptor divided by the EC₅₀ or potency or relative activity of Y at a GPCR is about 1 less than 5 (e.g., about 4, about 3, about 2, about 1). In some embodiments, the ratio of the glucagon potency of Q compared to the GPCR activating potency of Y is less than, or is about, Z, wherein Z is selected from 100, 75, 60, 50, 40, 30, 20, 15, 10, and 5. In some embodiments, the ratio of the glucagon potency of Q compared to the GPCR activating potency of Y is less than 5 (e.g., about 4, about 3, about 2, about 1). In some embodiments, Q has an EC₅₀ at the glucagon receptor which is 2- to 10-fold (e.g., 2-fold, 3-fold, 4-fold, 5-fold, 6-fold, 7-fold, 8-fold, 9-fold, 10-fold) greater than the EC₅₀ of Y at a GPCR.

[1099] In some embodiments, the ratio of the relative activity or potency or the EC₅₀ of Y at a GPCR divided by the relative activity or potency or the EC₅₀ of Q at the glucagon receptor is less than, or is about, V, wherein V is selected from 100, 75, 60, 50, 40, 30, 20, 15, 10, or 5. In some embodiments, the ratio of the EC₅₀ or potency or relative activity of Y at a GPCR divided by the EC₅₀ or potency or relative activity of Q at the glucagon receptor is less than 5 (e.g., about 4, about 3, about 2, about 1). In some embodiments, the ratio of the GPCR activating potency of Y compared to the glucagon potency of Q is less than, or is about, W, wherein W is selected from 100, 75, 60, 50, 40, 30, 20, 15, 10, and 5. In some embodiments, the ratio of the GPCR activating potency of Y compared to the glucagon potency of Q is less than 5 (e.g., about 4, about 3, about 2, about 1). In some embodiments, Y has an EC₅₀ at a GPCR which is about 2- to about 10-fold (e.g., 2-fold, 3-fold, 4-fold, 5-fold, 6-fold, 7-fold, 8-fold, 9-fold, 10-fold) greater than the EC₅₀ of Q at the glucagon receptor.

[1100] In some embodiments, Y exhibits at least 0.1% (e.g., about 0.5% or more, about 1% or more, about 5% or more, about 10% or more, or more) of the activity of an endogenous ligand at a GPCR (GPCR activating potency) and Q exhibits at least 0.1% (e.g., about 0.5% or more, about 1% or more, about 5% or more, about 10% or more, or more) of the activity of native glucagon at the glucagon receptor (glucagon potency).

### Activity at the GLP-1 Receptor and the GPCR

[1101] In some embodiments, Q-L-Y exhibits activity at both the GLP-1 receptor and a GPCR. In some embodiments, the activity (e.g., the EC₅₀ or the relative activity or potency) of Q at the GLP-1 receptor is within about 100-fold, about 75-fold, about 60-fold, about 50-fold, about 40-fold, about 30-fold, about 20-fold, about 10-fold, or about 5 fold different (higher or lower) from the activity (e.g., the EC₅₀ or the relative activity or potency) of Y at a GPCR. In some embodiments, the GLP-1 potency of Q is within about 25-, about 20-, about 15-, about 10-, or about 5-fold different (higher or lower) from the potency of Y.

[1102] In some embodiments, the ratio of the relative activity or the EC₅₀ or the potency of the Q at the GLP-1 receptor divided by the relative activity or the EC₅₀ or potency of Y at a GPCR is less than, or is about, X, wherein X is selected from 100, 75, 60, 50, 40, 30, 20, 15, 10, or 5. In some embodiments, the ratio of the EC₅₀ or potency or relative activity of Q at the GLP-1 receptor divided by the EC₅₀ or potency or relative activity of Y at a GPCR is about 1 less than 5 (e.g., about 4, about 3, about 2, about 1). In some embodiments, the ratio of the GLP-1 potency of Q compared to the GPCR activating potency of Y is less than, or is about, Z, wherein Z is selected from 100, 75, 60, 50, 40, 30, 20, 15, 10, and 5. In some embodiments, the ratio of the GLP-1 potency of Q compared to the GPCR activating potency of Y is less than 5 (e.g., about 4, about 3, about 2, about 1). In some embodiments, Q has an EC₅₀ at the GLP-1 receptor which is 2- to 10-fold (e.g., 2-fold, 3-fold, 4-fold, 5-fold, 6-fold, 7-fold, 8-fold, 9-fold, 10-fold) greater than the EC₅₀ of Y at a GPCR.

[1103] In some embodiments, the ratio of the relative activity or potency or the EC₅₀ of Y at a GPCR divided by the relative activity or potency or the EC₅₀ of Q at the GLP-1 receptor is less than, or is about, V, wherein V is selected from 100, 75, 60, 50, 40, 30, 20, 15, 10, or 5. In some embodiments, the ratio of the EC₅₀ or potency or relative activity of Y at a GPCR divided by the EC₅₀ or potency or relative activity of Q at the GLP-1 receptor is less than 5 (e.g., about 4, about 3, about 2, about 1). In some embodiments, the ratio of the GPCR activating potency of Y compared to the GLP-1 potency of Q is less than, or is about, W, wherein W is selected from 100, 75, 60, 50, 40, 30, 20, 15, 10, and 5. In some embodiments, the ratio of the GPCR activating potency of Y compared to the GLP-1 potency of Q is less than 5 (e.g., about 4, about 3, about 2, about 1). In some embodiments, Y has an EC₅₀ at a GPCR which is about 2- to about 10-fold (e.g., 2-fold, 3-fold, 4-fold, 5-fold, 6-fold, 7-fold, 8-fold, 9-fold, 10-fold) greater than the EC₅₀ of Q at the GLP-1 receptor.

[1104] In some embodiments, Y exhibits at least 0.1% (e.g., about 0.5% or more, about 1% or more, about 5% or more, about 10% or more, or more) of the activity of endogenous ligand at a GPCR (GPCR activating potency) and Q exhibits at least 0.1% (e.g., about 0.5% or more, about 1% or more, about 5% or more, about 10% or more, or more) of the activity of native GLP-1 at the GLP-1 receptor (GLP-1 potency).

### Activity at the GIP Receptor and the GPCR

[1105] In some embodiments, Q-L-Y exhibits activity at both the GIP receptor and a GPCR. In some embodiments, the activity (e.g., the EC₅₀ or the relative activity or potency) of Q at the GIP receptor is within about 100-fold, about 75-fold, about 60-fold, about 50-fold, about 40-fold, about 30-fold, about 20-fold, about 10-fold, or about 5 fold different (higher or lower) from the activity (e.g., the EC₅₀ or the relative activity or potency) of Y at a GPCR. In some embodiments, the GIP potency of Q is within about 25-, about 20-, about 15-, about 10-, or about 5-fold different (higher or lower) from the potency of Y.

[1106] In some embodiments, the ratio of the relative activity or the EC₅₀ or the potency of the Q at the GIP receptor divided by the relative activity or the EC₅₀ or potency of Y at a GPCR is less than, or is about, X, wherein X is selected from 100, 75, 60, 50, 40, 30, 20, 15, 10, or 5. In some embodiments, the ratio of the EC₅₀ or potency or relative activity of Q at the GIP receptor divided by the EC₅₀ or potency or relative activity of Y at a GPCR is about 1 less than 5 (e.g., about 4, about 3, about 2, about 1). In some embodiments, the ratio of the GIP potency of Q compared to the GPCR activating potency of Y is less than, or is about, Z, wherein Z is selected from 100, 75, 60, 50, 40, 30, 20, 15, 10, and 5. In some embodiments, the ratio of the GIP potency of Q compared to the GPCR activating potency of Y is less than 5 (e.g., about 4, about 3, about 2, about 1). In some embodiments, Q has an EC₅₀ at the GIP receptor which is 2- to 10-fold (e.g., 2-fold, 3-fold, 4-fold, 5-fold, 6-fold, 7-fold, 8-fold, 9-fold, 10-fold) greater than the EC₅₀ of Y at a GPCR.

[1107] In some embodiments, the ratio of the relative activity or potency or the EC₅₀ of Y at a GPCR divided by the relative activity or potency or the EC₅₀ of Q at the GIP receptor is less than, or is about, V, wherein V is selected from 100, 75, 60, 50, 40, 30, 20, 15, 10, or 5. In some embodiments, the ratio of the EC₅₀ or potency or relative activity of Y at a GPCR divided by the EC₅₀ or potency or relative activity of Q at the GIP receptor is less than 5 (e.g., about 4, about 3, about 2, about 1). In some embodiments, the ratio of the GPCR activating potency of Y compared to the GIP potency of Q is less than, or is about, W, wherein W is selected from 100, 75, 60, 50, 40, 30, 20, 15, 10, and 5. In some embodiments, the ratio of the GPCR activating potency of Y compared to the GIP potency of Q is less than 5 (e.g., about 4, about 3, about 2, about 1). In some embodiments, Y has an EC₅₀ at a GPCR which is about 2- to about 10-fold (e.g., 2-fold, 3-fold, 4-fold, 5-fold, 6-fold, 7-fold, 8-fold, 9-fold, 10-fold) greater than the EC₅₀ of Q at the GIP receptor.

[1108] In some embodiments, Y exhibits at least 0.1% (e.g., about 0.5% or more, about 1% or more, about 5% or more, about 10% or more, or more) of the activity of endogenous ligand at a GPCR (GPCR activating potency) and Q exhibits at least 0.1% (e.g., about 0.5% or more, about 1% or more, about 5% or more, about 10% or more, or more) of the activity of native GIP at the GIP receptor (GIP potency).

### Prodrugs of Q-L-Y

[1109] In some aspects of the invention, prodrugs of Q-L-Y are provided wherein the prodrug comprises a dipeptide prodrug element (A-B) covalently linked to an active site of Q via an amide linkage, as disclosed in International Patent Application No. PCT US09/68745 (filed on Dec. 18, 2009), which is incorporated herein by reference in its entirety. Subsequent removal of the dipeptide under physiological conditions and in the absence of enzymatic activity, restores full activity to the Q-L-Y conjugate.

[1110] In some embodiments a prodrug of Q-L-Y is provided having the general structure of A-B-Q-L-Y. In these embodiments A is an amino acid or a hydroxy acid and B is an N-alkylated amino acid linked to Q through formation of an amide bond between a carboxyl of B (in A-B) and an amine of Q. Furthermore, in some embodiments, A, B, or the amino acid of Q to which A-B is linked, is a non-coded amino acid, and chemical cleavage of A-B from Q is at least about 90% complete within about 1 to about 720 hours in PBS under physiological conditions. In another embodiment, chemical cleavage of A-B from Q is at least about 50% complete within about 1 hour or about 1 week in PBS under physiological conditions.

[1111] In some embodiment the dipeptide prodrug element (A-B) comprises a compound having the general structure below:

[chemical structure]

[1112] wherein

[1113] R₁, R₂, R₄ and R₈ are independently selected from the group consisting of H, C₁-C₁₈ alkyl, C₂-C₁₈ alkenyl, (C₁-C₁₈ alkyl)OH, (C₁-C₁₈ alkyl)SH, (C₂-C₃ alkyl)SCH₃, (C₁-C₄ alkyl)CONH₂, (C₁-C₄ alkyl)COOH, (C₁-C₄ alkyl)NH₂, (C₁-C₄ alkyl)NHC(NH₂⁺)NH₂, (C₀-C₄ alkyl)(C₃-C₆ cycloalkyl), (C₀-C₄ alkyl)(C₂-C₅ heterocyclic), (C₀-C₄ alkyl)(C₆-C₁₀ aryl)R₇, (C₁-C₄ alkyl)(C₃-C₉ heteroaryl), and C₁-C₁₂ alkyl(W₁)C₁-C₁₂ alkyl, wherein W₁ is a heteroatom selected from the group consisting of N, S and O, or R₁ and R₂ together with the atoms to which they are attached form a C₃-C₁₂ cycloalkyl; or R₄ and R₈ together with the atoms to which they are attached form a C₃-C₆ cycloalkyl;

[1114] R₃ is selected from the group consisting of C₁-C₁₈ alkyl, (C₁-C₁₈ alkyl)OH, (C₁-C₁₈ alkyl)NH₂, (C₁-C₁₈ alkyl)SH, (C₀-C₄ alkyl)(C₃-C₆)cycloalkyl, (C₀-C₄ alkyl)(C₂-C₅ heterocyclic), (C₀-C₄ alkyl)(C₆-C₁₀ aryl)R₇, and (C₁-C₄ alkyl)(C₃-C₉ heteroaryl) or R₄ and R₃ together with the atoms to which they are attached form a 4, 5 or 6 member heterocyclic ring;

[1115] R₅ is NHR₆ or OH;

[1116] R₆ is H, C₁-C₈ alkyl or R₆ and R₁ together with the atoms to which they are attached form a 4, 5 or 6 member heterocyclic ring; and

[1117] R₇ is selected from the group consisting of hydrogen, C₁-C₁₈ alkyl, C₂-C₁₈ alkenyl, (C₀-C₄ alkyl)CONH₂, (C₀-C₄ alkyl)COOH, (C₀-C₄ alkyl)NH₂, (C₀-C₄ alkyl)OH, and halo.

[1118] In some embodiments, the dipeptide prodrug element is linked to the amino terminus of Q. In other embodiments, the dipeptide prodrug is linked to an internal amino acid of Q, as described in International Patent Application No. PCT US09/68745.

[1119] The conjugates comprising the glucagon superfamily peptides of the invention (Q) and a GPCR ligand (Y) have synergistic pharmacology. The Q portion of these conjugates can act to direct the GPCR portion of the conjugate to targets of desired action to result in improved glycemic control (e.g. as measured by decreased glucose levels) and energy homeostasis (e.g. as measured by decreased body weight and/or fat mass), with an enhanced therapeutic index.

[1120] For example, in diet-induced obese mice, a fully active GLP-1 agonist with a stably-linked GPCR are more efficacious in reducing blood glucose and body weight than the comparative GLP-1 control, and the combined presence of GLP-1 and targeted GPCR can achieve superior reductions in glucose and body weight.

[1121] The “meta”-stable peptide-GPCR conjugates are stable in plasma but capable of releasing a GPCR ligand upon cellular internalization. These glucagon superfamily peptide/GPCR conjugates with metastable linkages are able to lower glucose levels and body weight to a greater extent than conjugates with labile linkages.

[1122] In exemplary embodiments, the conjugates are useful for treating any of the conditions described herein, including but not limited to a hyperglycemic medical condition, obesity, metabolic syndrome, and NAFLD.

### Pharmaceutical Compositions

### Salts

[1123] In some embodiments, the Q-L-Y conjugates described herein are in the form of a salt, e.g., a pharmaceutically acceptable salt. As used herein the term “pharmaceutically acceptable salt” refers to salts of compounds that retain the biological activity of the parent compound, and which are not biologically or otherwise undesirable. Such salts can be prepared in situ during the final isolation and purification of the conjugate, or separately prepared by reacting a free base function with a suitable acid. Many of the compounds disclosed herein are capable of forming acid and/or base salts by virtue of the presence of amino and/or carboxyl groups or groups similar thereto.

[1124] Pharmaceutically acceptable acid addition salts may be prepared from inorganic and organic acids. Representative acid addition salts include, but are not limited to acetate, adipate, alginate, citrate, aspartate, benzoate, benzenesulfonate, bisulfate, butyrate, camphorate, camphor sulfonate, digluconate, glycerophosphate, hemisulfate, heptanoate, hexanoate, fumarate, hydrochloride, hydrobromide, hydroiodide, 2-hydroxyethansulfonate (isothionate), lactate, maleate, methane sulfonate, nicotinate, 2-naphthalene sulfonate, oxalate, palmitoate, pectinate, persulfate, 3-phenylpropionate, picrate, pivalate, propionate, succinate, tartrate, thiocyanate, phosphate, glutamate, bicarbonate, p-toluenesulfonate, and undecanoate. Salts derived from inorganic acids include hydrochloric acid, hydrobromic acid, sulfuric acid, nitric acid, phosphoric acid, and the like. Salts derived from organic acids include acetic acid, propionic acid, glycolic acid, pyruvic acid, oxalic acid, malic acid, malonic acid, succinic acid, maleic acid, fumaric acid, tartaric acid, citric acid, benzoic acid, cinnamic acid, mandelic acid, methanesulfonic acid, ethanesulfonic acid, p-toluene-sulfonic acid, salicylic acid, and the like. Examples of acids which can be employed to form pharmaceutically acceptable acid addition salts include, for example, an inorganic acid, e.g., hydrochloric acid, hydrobromic acid, sulphuric acid, and phosphoric acid, and an organic acid, e.g., oxalic acid, maleic acid, succinic acid, and citric acid.

[1125] Basic addition salts also can be prepared in situ during the final isolation and purification of the source of salicylic acid, or by reacting a carboxylic acid-containing moiety with a suitable base such as the hydroxide, carbonate, or bicarbonate of a pharmaceutically acceptable metal cation or with ammonia or an organic primary, secondary, or tertiary amine. Pharmaceutically acceptable salts include, but are not limited to, cations based on alkali metals or alkaline earth metals such as lithium, sodium, potassium, calcium, magnesium, and aluminum salts, and the like, and nontoxic quaternary ammonia and amine cations including ammonium, tetramethylammonium, tetraethylammonium, methylammonium, dimethylammonium, trimethylammonium, triethylammonium, diethylammonium, and ethylammonium, amongst others. Other representative organic amines useful for the formation of base addition salts include, for example, ethylenediamine, ethanolamine, diethanolamine, piperidine, piperazine, and the like. Salts derived from organic bases include, but are not limited to, salts of primary, secondary and tertiary amines.

[1126] Further, basic nitrogen-containing groups can be quaternized with the conjugate of the present disclosure as lower alkyl halides such as methyl, ethyl, propyl, and butyl chlorides, bromides, and iodides; long chain halides such as decyl, lauryl, myristyl, and stearyl chlorides, bromides, and iodides; arylalkyl halides like benzyl and phenethyl bromides and others. Water or oil-soluble or dispersible products are thereby obtained.

### Formulations

[1127] In accordance with some embodiments, a pharmaceutical composition is provided wherein the composition comprises a Q-L-Y conjugate of the present disclosure, or pharmaceutically acceptable salt thereof, and a pharmaceutically acceptable carrier. The pharmaceutical composition can comprise any pharmaceutically acceptable ingredient, including, for example, acidifying agents, additives, adsorbents, aerosol propellants, air displacement agents, alkalizing agents, anticaking agents, anticoagulants, antimicrobial preservatives, antioxidants, antiseptics, bases, binders, buffering agents, chelating agents, coating agents, coloring agents, desiccants, detergents, diluents, disinfectants, disintegrants, dispersing agents, dissolution enhancing agents, dyes, emollients, emulsifying agents, emulsion stabilizers, fillers, film forming agents, flavor enhancers, flavoring agents, flow enhancers, gelling agents, granulating agents, humectants, lubricants, mucoadhesives, ointment bases, ointments, oleaginous vehicles, organic bases, pastille bases, pigments, plasticizers, polishing agents, preservatives, sequestering agents, skin penetrants, solubilizing agents, solvents, stabilizing agents, suppository bases, surface active agents, surfactants, suspending agents, sweetening agents, therapeutic agents, thickening agents, tonicity agents, toxicity agents, viscosity-increasing agents, water-absorbing agents, water-miscible cosolvents, water softeners, or wetting agents.

[1128] In some embodiments, the pharmaceutical composition comprises any one or a combination of the following components: acacia, acesulfame potassium, acetyltributyl citrate, acetyltriethyl citrate, agar, albumin, alcohol, dehydrated alcohol, denatured alcohol, dilute alcohol, aleuritic acid, alginic acid, aliphatic polyesters, alumina, aluminum hydroxide, aluminum stearate, amylopectin, α-amylose, ascorbic acid, ascorbyl palmitate, aspartame, bacteriostatic water for injection, bentonite, bentonite magma, benzalkonium chloride, benzethonium chloride, benzoic acid, benzyl alcohol, benzyl benzoate, bronopol, butylated hydroxyanisole, butylated hydroxytoluene, butylparaben, butylparaben sodium, calcium alginate, calcium ascorbate, calcium carbonate, calcium cyclamate, dibasic anhydrous calcium phosphate, dibasic dehydrate calcium phosphate, tribasic calcium phosphate, calcium propionate, calcium silicate, calcium sorbate, calcium stearate, calcium sulfate, calcium sulfate hemihydrate, canola oil, carbomer, carbon dioxide, carboxymethyl cellulose calcium, carboxymethyl cellulose sodium, β-carotene, carrageenan, castor oil, hydrogenated castor oil, cationic emulsifying wax, cellulose acetate, cellulose acetate phthalate, ethyl cellulose, microcrystalline cellulose, powdered cellulose, silicified microcrystalline cellulose, sodium carboxymethyl cellulose, cetostearyl alcohol, cetrimide, cetyl alcohol, chlorhexidine, chlorobutanol, chlorocresol, cholesterol, chlorhexidine acetate, chlorhexidine gluconate, chlorhexidine hydrochloride, chlorodifluoroethane (HCFC), chlorodifluoromethane, chlorofluorocarbons (CFC) chlorophenoxyethanol, chloroxylenol, corn syrup solids, anhydrous citric acid, citric acid monohydrate, cocoa butter, coloring agents, corn oil, cottonseed oil, cresol, m-cresol, o-cresol, p-cresol, croscarmellose sodium, crospovidone, cyclamic acid, cyclodextrins, dextrates, dextrin, dextrose, dextrose anhydrous, diazolidinyl urea, dibutyl phthalate, dibutyl sebacate, diethanolamine, diethyl phthalate, difluoroethane (HFC), dimethyl-β-cyclodextrin, cyclodextrin-type compounds such as Captisol®, dimethyl ether, dimethyl phthalate, dipotassium edentate, disodium edentate, disodium hydrogen phosphate, docusate calcium, docusate potassium, docusate sodium, dodecyl gallate, dodecyltrimethylammonium bromide, edentate calcium disodium, edtic acid, eglumine, ethyl alcohol, ethylcellulose, ethyl gallate, ethyl laurate, ethyl maltol, ethyl oleate, ethylparaben, ethylparaben potassium, ethylparaben sodium, ethyl vanillin, fructose, fructose liquid, fructose milled, fructose pyrogen-free, powdered fructose, fumaric acid, gelatin, glucose, liquid glucose, glyceride mixtures of saturated vegetable fatty acids, glycerin, glyceryl behenate, glyceryl monooleate, glyceryl monostearate, self-emulsifying glyceryl monostearate, glyceryl palmitostearate, glycine, glycols, glycofurol, guar gum, heptafluoropropane (HFC), hexadecyltrimethylammonium bromide, high fructose syrup, human serum albumin, hydrocarbons (HC), dilute hydrochloric acid, hydrogenated vegetable oil, type II, hydroxyethyl cellulose, 2-hydroxyethyl-β-cyclodextrin, hydroxypropyl cellulose, low-substituted hydroxypropyl cellulose, 2-hydroxypropyl-β-cyclodextrin, hydroxypropyl methylcellulose, hydroxypropyl methylcellulose phthalate, imidurea, indigo carmine, ion exchangers, iron oxides, isopropyl alcohol, isopropyl myristate, isopropyl palmitate, isotonic saline, kaolin, lactic acid, lactitol, lactose, lanolin, lanolin alcohols, anhydrous lanolin, lecithin, magnesium aluminum silicate, magnesium carbonate, normal magnesium carbonate, magnesium carbonate anhydrous, magnesium carbonate hydroxide, magnesium hydroxide, magnesium lauryl sulfate, magnesium oxide, magnesium silicate, magnesium stearate, magnesium trisilicate, magnesium trisilicate anhydrous, malic acid, malt, maltitol, maltitol solution, maltodextrin, maltol, maltose, mannitol, medium chain triglycerides, meglumine, menthol, methylcellulose, methyl methacrylate, methyl oleate, methylparaben, methylparaben potassium, methylparaben sodium, microcrystalline cellulose and carboxymethylcellulose sodium, mineral oil, light mineral oil, mineral oil and lanolin alcohols, oil, olive oil, monoethanolamine, montmorillonite, octyl gallate, oleic acid, palmitic acid, paraffin, peanut oil, petrolatum, petrolatum and lanolin alcohols, pharmaceutical glaze, phenol, liquified phenol, phenoxyethanol, phenoxypropanol, phenylethyl alcohol, phenylmercuric acetate, phenylmercuric borate, phenylmercuric nitrate, polacrilin, polacrilin potassium, poloxamer, polydextrose, polyethylene glycol, polyethylene oxide, polyacrylates, polyethylene-polyoxypropylene-block polymers, polymethacrylates, polyoxyethylene alkyl ethers, polyoxyethylene castor oil derivatives, polyoxyethylene sorbitol fatty acid esters, polyoxyethylene stearates, polyvinyl alcohol, polyvinyl pyrrolidone, potassium alginate, potassium benzoate, potassium bicarbonate, potassium bisulfite, potassium chloride, potassium citrate, potassium citrate anhydrous, potassium hydrogen phosphate, potassium metabisulfite, monobasic potassium phosphate, potassium propionate, potassium sorbate, povidone, propanol, propionic acid, propylene carbonate, propylene glycol, propylene glycol alginate, propyl gallate, propylparaben, propylparaben potassium, propylparaben sodium, protamine sulfate, rapeseed oil, Ringer's solution, saccharin, saccharin ammonium, saccharin calcium, saccharin sodium, safflower oil, saponite, serum proteins, sesame oil, colloidal silica, colloidal silicon dioxide, sodium alginate, sodium ascorbate, sodium benzoate, sodium bicarbonate, sodium bisulfite, sodium chloride, anhydrous sodium citrate, sodium citrate dehydrate, sodium chloride, sodium cyclamate, sodium edentate, sodium dodecyl sulfate, sodium lauryl sulfate, sodium metabisulfite, sodium phosphate, dibasic, sodium phosphate, monobasic, sodium phosphate, tribasic, anhydrous sodium propionate, sodium propionate, sodium sorbate, sodium starch glycolate, sodium stearyl fumarate, sodium sulfite, sorbic acid, sorbitan esters (sorbitan fatty esters), sorbitol, sorbitol solution 70%, soybean oil, spermaceti wax, starch, corn starch, potato starch, pregelatinized starch, sterilizable maize starch, stearic acid, purified stearic acid, stearyl alcohol, sucrose, sugars, compressible sugar, confectioner's sugar, sugar spheres, invert sugar, Sugartab, Sunset Yellow FCF, synthetic paraffin, talc, tartaric acid, tartrazine, tetrafluoroethane (HFC), theobroma oil, thimerosal, titanium dioxide, alpha tocopherol, tocopheryl acetate, alpha tocopheryl acid succinate, beta-tocopherol, delta-tocopherol, gamma-tocopherol, tragacanth, triacetin, tributyl citrate, triethanolamine, triethyl citrate, trimethyl-β-cyclodextrin, trimethyltetradecylammonium bromide, tris buffer, trisodium edentate, vanillin, type I hydrogenated vegetable oil, water, soft water, hard water, carbon dioxide-free water, pyrogen-free water, water for injection, sterile water for inhalation, sterile water for injection, sterile water for irrigation, waxes, anionic emulsifying wax, carnauba wax, cationic emulsifying wax, cetyl ester wax, microcrystalline wax, nonionic emulsifying wax, suppository wax, white wax, yellow wax, white petrolatum, wool fat, xanthan gum, xylitol, zein, zinc propionate, zinc salts, zinc stearate, or any excipient in the Handbook of Pharmaceutical Excipients, Third Edition, A. H. Kibbe (Pharmaceutical Press, London, UK, 2000), which is incorporated by reference in its entirety. Remington's Pharmaceutical Sciences, Sixteenth Edition, E.W. Martin (Mack Publishing Co., Easton, Pa., 1980), which is incorporated by reference in its entirety, discloses various components used in formulating pharmaceutically acceptable compositions and known techniques for the preparation thereof. Except insofar as any conventional agent is incompatible with the pharmaceutical compositions, its use in pharmaceutical compositions is contemplated. Supplementary active ingredients also can be incorporated into the compositions.

[1129] In some embodiments, the foregoing component(s) may be present in the pharmaceutical composition at any concentration, such as, for example, at least A, wherein A is 0.0001% w/v, 0.001% w/v, 0.01% w/v, 0.1% w/v, 1% w/v, 2% w/v, 5% w/v, 10% w/v, 20% w/v, 30% w/v, 40% w/v, 50% w/v, 60% w/v, 70% w/v, 80% w/v, or 90% w/v. In some embodiments, the foregoing component(s) may be present in the pharmaceutical composition at any concentration, such as, for example, at most B, wherein B is 90% w/v, 80% w/v, 70% w/v, 60% w/v, 50% w/v, 40% w/v, 30% w/v, 20% w/v, 10% w/v, 5% w/v, 2% w/v, 1% w/v, 0.1% w/v, 0.001% w/v, or 0.0001%. In other embodiments, the foregoing component(s) may be present in the pharmaceutical composition at any concentration range, such as, for example from about A to about B. In some embodiments, A is 0.0001% and B is 90%.

[1130] The pharmaceutical compositions may be formulated to achieve a physiologically compatible pH. In some embodiments, the pH of the pharmaceutical composition may be at least 5, at least 5.5, at least 6, at least 6.5, at least 7, at least 7.5, at least 8, at least 8.5, at least 9, at least 9.5, at least 10, or at least 10.5 up to and including pH 11, depending on the formulation and route of administration. In certain embodiments, the pharmaceutical compositions may comprise buffering agents to achieve a physiological compatible pH. The buffering agents may include any compounds capabale of buffering at the desired pH such as, for example, phosphate buffers (e.g., PBS), triethanolamine, Tris, bicine, TAPS, tricine, HEPES, TES, MOPS, PIPES, cacodylate, MES, and others. In certain embodiments, the strength of the buffer is at least 0.5 mM, at least 1 mM, at least 5 mM, at least 10 mM, at least 20 mM, at least 30 mM, at least 40 mM, at least 50 mM, at least 60 mM, at least 70 mM, at least 80 mM, at least 90 mM, at least 100 mM, at least 120 mM, at least 150 mM, or at least 200 mM. In some embodiments, the strength of the buffer is no more than 300 mM (e.g., at most 200 mM, at most 100 mM, at most 90 mM, at most 80 mM, at most 70 mM, at most 60 mM, at most 50 mM, at most 40 mM, at most 30 mM, at most 20 mM, at most 10 mM, at most 5 mM, at most 1 mM).

### Routes of Administration

[1131] The following discussion on routes of administration is merely provided to illustrate exemplary embodiments and should not be construed as limiting the scope in any way.

[1132] Formulations suitable for oral administration can consist of (a) liquid solutions, such as an effective amount of the conjugate of the present disclosure dissolved in diluents, such as water, saline, or orange juice; (b) capsules, sachets, tablets, lozenges, and troches, each containing a predetermined amount of the active ingredient, as solids or granules; (c) powders; (d) suspensions in an appropriate liquid; and (e) suitable emulsions. Liquid formulations may include diluents, such as water and alcohols, for example, ethanol, benzyl alcohol, and the polyethylene alcohols, either with or without the addition of a pharmaceutically acceptable surfactant. Capsule forms can be of the ordinary hard- or soft-shelled gelatin type containing, for example, surfactants, lubricants, and inert fillers, such as lactose, sucrose, calcium phosphate, and corn starch. Tablet forms can include one or more of lactose, sucrose, mannitol, corn starch, potato starch, alginic acid, microcrystalline cellulose, acacia, gelatin, guar gum, colloidal silicon dioxide, croscarmellose sodium, talc, magnesium stearate, calcium stearate, zinc stearate, stearic acid, and other excipients, colorants, diluents, buffering agents, disintegrating agents, moistening agents, preservatives, flavoring agents, and other pharmacologically compatible excipients. Lozenge forms can comprise the conjugate of the present disclosure in a flavor, usually sucrose and acacia or tragacanth, as well as pastilles comprising the conjugate of the present disclosure in an inert base, such as gelatin and glycerin, or sucrose and acacia, emulsions, gels, and the like containing, in addition to, such excipients as are known in the art.

[1133] The conjugates of the disclosure, alone or in combination with other suitable components, can be delivered via pulmonary administration and can be made into aerosol formulations to be administered via inhalation. These aerosol formulations can be placed into pressurized acceptable propellants, such as dichlorodifluoromethane, propane, nitrogen, and the like. They also may be formulated as pharmaceuticals for non-pressured preparations, such as in a nebulizer or an atomizer. Such spray formulations also may be used to spray mucosa. In some embodiments, the conjugate is formulated into a powder blend or into microparticles or nanoparticles. Suitable pulmonary formulations are known in the art. See, e.g., Qian et al., Int J Pharm 366: 218-220 (2009); Adjei and Garren, Pharmaceutical Research, 7(6): 565-569 (1990); Kawashima et al., J Controlled Release 62(1-2): 279-287 (1999); Liu et al., Pharm Res 10(2): 228-232 (1993); International Patent Application Publication Nos. WO 2007/133747 and WO 2007/141411.

[1134] Formulations suitable for parenteral administration include aqueous and non-aqueous, isotonic sterile injection solutions, which can contain anti-oxidants, buffers, bacteriostats, and solutes that render the formulation isotonic with the blood of the intended recipient, and aqueous and non-aqueous sterile suspensions that can include suspending agents, solubilizers, thickening agents, stabilizers, and preservatives. The term, “parenteral” means not through the alimentary canal but by some other route such as subcutaneous, intramuscular, intraspinal, or intravenous. The conjugate of the present disclosure can be administered with a physiologically acceptable diluent in a pharmaceutical carrier, such as a sterile liquid or mixture of liquids, including water, saline, aqueous dextrose and related sugar solutions, an alcohol, such as ethanol or hexadecyl alcohol, a glycol, such as propylene glycol or polyethylene glycol, dimethylsulfoxide, glycerol, ketals such as 2,2-dimethyl-153-dioxolane-4-methanol, ethers, poly(ethyleneglycol) 400, oils, fatty acids, fatty acid esters or glycerides, or acetylated fatty acid glycerides with or without the addition of a pharmaceutically acceptable surfactant, such as a soap or a detergent, suspending agent, such as pectin, carbomers, methylcellulose, hydroxypropylmethylcellulose, or carboxymethylcellulose, or emulsifying agents and other pharmaceutical adjuvants.

[1135] Oils, which can be used in parenteral formulations include petroleum, animal, vegetable, or synthetic oils. Specific examples of oils include peanut, soybean, sesame, cottonseed, corn, olive, petrolatum, and mineral. Suitable fatty acids for use in parenteral formulations include oleic acid, stearic acid, and isostearic acid. Ethyl oleate and isopropyl myristate are examples of suitable fatty acid esters.

[1136] Suitable soaps for use in parenteral formulations include fatty alkali metal, ammonium, and triethanolamine salts, and suitable detergents include (a) cationic detergents such as, for example, dimethyl dialkyl ammonium halides, and alkyl pyridinium halides, (b) anionic detergents such as, for example, alkyl, aryl, and olefin sulfonates, alkyl, olefin, ether, and monoglyceride sulfates, and sulfosuccinates, (c) nonionic detergents such as, for example, fatty amine oxides, fatty acid alkanolamides, and polyoxyethylenepolypropylene copolymers, (d) amphoteric detergents such as, for example, alkyl-β-aminopropionates, and 2-alkyl-imidazoline quaternary ammonium salts, and (e) mixtures thereof.

[1137] The parenteral formulations will typically contain from about 0.5% to about 25% by weight of Q-L-Y conjugate of the present disclosure in solution. Preservatives and buffers may be used. In order to minimize or eliminate irritation at the site of injection, such compositions may contain one or more nonionic surfactants having a hydrophile-lipophile balance (HLB) of from about 12 to about 17. The quantity of surfactant in such formulations will typically range from about 5% to about 15% by weight. Suitable surfactants include polyethylene glycol sorbitan fatty acid esters, such as sorbitan monooleate and the high molecular weight adducts of ethylene oxide with a hydrophobic base, formed by the condensation of propylene oxide with propylene glycol. The parenteral formulations can be presented in unit-dose or multi-dose sealed containers, such as ampoules and vials, and can be stored in a freeze-dried (lyophilized) condition requiring only the addition of the sterile liquid excipient, for example, water, for injections, immediately prior to use. Extemporaneous injection solutions and suspensions can be prepared from sterile powders, granules, and tablets of the kind previously described.

[1138] Injectable formulations are in accordance with the invention. The requirements for effective pharmaceutical carriers for injectable compositions are well-known to those of ordinary skill in the art (see, e.g., Pharmaceutics and Pharmacy Practice, J.B. Lippincott Company, Philadelphia, Pa., Banker and Chalmers, eds., pages 238-250 (1982), and ASHP Handbook on Injectable Drugs, Toissel, 4th ed., pages 622-630 (1986)).

[1139] Additionally, the conjugate of the present disclosures can be made into suppositories for rectal administration by mixing with a variety of bases, such as emulsifying bases or water-soluble bases. Formulations suitable for vaginal administration can be presented as pessaries, tampons, creams, gels, pastes, foams, or spray formulas containing, in addition to the active ingredient, such carriers as are known in the art to be appropriate.

[1140] It will be appreciated by one of skill in the art that, in addition to the above-described pharmaceutical compositions, the conjugate of the disclosure can be formulated as inclusion complexes, such as cyclodextrin inclusion complexes, or liposomes.

### Dose

[1141] The Q-L-Y conjugates of the disclosure are believed to be useful in methods of treating a disease or medical condition in which glucagon receptor agonism, GLP-1 receptor agonism, GIP receptor agonism, glucagon receptor/GLP-1 receptor co-agonism, glucagon receptor/GIP receptor co-agonism, GLP-1 receptor/GIP receptor co-agonism or glucagon receptor/GLP-1 receptor/GIP receptor tri-agonism plays a role. For purposes of the disclosure, the amount or dose of the conjugate of the present disclosure administered should be sufficient to effect, e.g., a therapeutic or prophylactic response, in the subject or animal over a reasonable time frame. For example, the dose of the conjugate of the present disclosure should be sufficient to stimulate cAMP secretion from cells as described herein or sufficient to decrease blood glucose levels, fat levels, food intake levels, or body weight of a mammal, in a period of from about 1 to 4 minutes, 1 to 4 hours or 1 to 4 weeks or longer, e.g., 5 to 20 or more weeks, from the time of administration. In certain embodiments, the time period could be even longer. The dose will be determined by the efficacy of the particular conjugate of the present disclosure and the condition of the animal (e.g., human), as well as the body weight of the animal (e.g., human) to be treated.

[1142] Many assays for determining an administered dose are known in the art. For purposes herein, an assay, which comprises comparing the extent to which blood glucose levels are lowered upon administration of a given dose of the conjugate of the present disclosure to a mammal among a set of mammals of which is each given a different dose of the conjugate, could be used to determine a starting dose to be administered to a mammal. The extent to which blood glucose levels are lowered upon administration of a certain dose can be assayed by methods known in the art.

[1143] The dose of the conjugate of the present disclosure also will be determined by the existence, nature and extent of any adverse side effects that might accompany the administration of a particular conjugate of the present disclosure. Typically, the attending physician will decide the dosage of the conjugate of the present disclosure with which to treat each individual patient, taking into consideration a variety of factors, such as age, body weight, general health, diet, sex, conjugate of the present disclosure to be administered, route of administration, and the severity of the condition being treated. By way of example and not intending to limit the invention, the dose of the conjugate of the present disclosure can be about 0.0001 to about 1 g/kg body weight of the subject being treated/day, from about 0.0001 to about 0.001 g/kg body weight/day, or about 0.01 mg to about 1 g/kg body weight/day.

[1144] In some embodiments, the pharmaceutical composition comprises any of the conjugates disclosed herein at a purity level suitable for administration to a patient. In some embodiments, the conjugate has a purity level of at least about 90%, about 91%, about 92%, about 93%, about 94%, about 95%, about 96%, about 97%, about 98% or about 99%, and a pharmaceutically acceptable diluent, carrier or excipient. The pharmaceutical composition in some aspects comprise the conjugate of the present disclosure at a concentration of at least A, wherein A is about 0.001 mg/ml, about 0.01 mg/ml, 0 about 1 mg/ml, about 0.5 mg/ml, about 1 mg/ml, about 2 mg/ml, about 3 mg/ml, about 4 mg/ml, about 5 mg/ml, about 6 mg/ml, about 7 mg/ml, about 8 mg/ml, about 9 mg/ml, about 10 mg/ml, about 11 mg/ml, about 12 mg/ml, about 13 mg/ml, about 14 mg/ml, about 15 mg/ml, about 16 mg/ml, about 17 mg/ml, about 18 mg/ml, about 19 mg/ml, about 20 mg/ml, about 21 mg/ml, about 22 mg/ml, about 23 mg/ml, about 24 mg/ml, about 25 mg/ml or higher. In some embodiments, the pharmaceutical composition comprises the conjugate at a concentration of at most B, wherein B is about 30 mg/ml, about 25 mg/ml, about 24 mg/ml, about 23, mg/ml, about 22 mg/ml, about 21 mg/ml, about 20 mg/ml, about 19 mg/ml, about 18 mg/ml, about 17 mg/ml, about 16 mg/ml, about 15 mg/ml, about 14 mg/ml, about 13 mg/ml, about 12 mg/ml, about 11 mg/ml, about 10 mg/ml, about 9 mg/ml, about 8 mg/ml, about 7 mg/ml, about 6 mg/ml, about 5 mg/ml, about 4 mg/ml, about 3 mg/ml, about 2 mg/ml, about 1 mg/ml, or about 0.1 mg/ml. In some embodiments, the compositions may contain an conjugate at a concentration range of A to B mg/ml, for example, about 0.001 to about 30.0 mg/ml.

### Targeted Forms

[1145] One of ordinary skill in the art will readily appreciate that the Q-L-Y conjugates of the disclosure can be modified in any number of ways, such that the therapeutic or prophylactic efficacy of the conjugate of the present disclosures is increased through the modification. For instance, the conjugate of the present disclosure can be further conjugated either directly or indirectly through a linker to a targeting moiety. The practice of conjugating compounds, e.g., glucagon conjugates described herein, to targeting moieties is known in the art. See, for instance, Wadhwa et al., J Drug Targeting, 3, 111-127 (1995) and U.S. Pat. No. 5,087,616. The term “targeting moiety” as used herein, refers to any molecule or agent that specifically recognizes and binds to a cell-surface receptor, such that the targeting moiety directs the delivery of the conjugate of the present disclosures to a population of cells on which surface the receptor (the glucagon receptor, the GLP-1 receptor) is expressed. Targeting moieties include, but are not limited to, antibodies, or fragments thereof, peptides, hormones, growth factors, cytokines, and any other natural or non-natural ligands, which bind to cell surface receptors (e.g., Epithelial Growth Factor Receptor (EGFR), T-cell receptor (TCR), B-cell receptor (BCR), CD28, Platelet-derived Growth Factor Receptor (PDGF), nicotinic acetylcholine receptor (nAChR), etc.). As used herein a “linker” is a bond, molecule or group of molecules that binds two separate entities to one another. Linkers may provide for optimal spacing of the two entities or may further supply a labile linkage that allows the two entities to be separated from each other. Labile linkages include photocleavable groups, acid-labile moieties, base-labile moieties, hydrolyzable groups, and enzyme-cleavable groups. The term “linker” in some embodiments refers to any agent or molecule that bridges the conjugate of the present disclosures to the targeting moiety. One of ordinary skill in the art recognizes that sites on the conjugate of the present disclosures, which are not necessary for the function of the conjugate of the present disclosures, are ideal sites for attaching a linker and/or a targeting moiety, provided that the linker and/or targeting moiety, once attached to the conjugate of the present disclosures, do(es) not interfere with the function of the conjugate of the present disclosures, i.e., the ability to stimulate cAMP secretion from cells, to treat diabetes or obesity. One of ordinary skill in the art recognizes that sites on the peptide of the present disclosures (Q), which are not necessary for the function of the peptide of the present disclosures (e.g., glucagon agonist peptide, glucagon antagonist peptide, GLP-1 agonist peptide, GIP agonist peptide, or a combination of any of the foregoing), are ideal sites for attaching a linker and/or a targeting moiety, provided that the linker and/or targeting moiety, once attached to the peptide of the present disclosures (Q), does not interfere with the function of the peptide of the present disclosures.

### Controlled Release Formulations

[1146] Alternatively, the glucagon conjugates described herein can be modified into a depot form, such that the manner in which the conjugate of the present disclosures is released into the body to which it is administered is controlled with respect to time and location within the body (see, for example, U.S. Pat. No. 4,450,150). Depot forms of conjugate of the present disclosures can be, for example, an implantable composition comprising the conjugate of the present disclosures and a porous or non-porous material, such as a polymer, wherein the conjugate of the present disclosures is encapsulated by or diffused throughout the material and/or degradation of the non-porous material. The depot is then implanted into the desired location within the body and the conjugate of the present disclosures are released from the implant at a predetermined rate.

[1147] The pharmaceutical composition in certain aspects is modified to have any type of in vivo release profile. In some aspects, the pharmaceutical composition is an immediate release, controlled release, sustained release, extended release, delayed release, or bi-phasic release formulation. Methods of formulating peptides or conjugates for controlled release are known in the art. See, for example, Qian et al., J Pharm 374: 46-52 (2009) and International Patent Application Publication Nos. WO 2008/130158, WO2004/033036; WO2000/032218; and WO 1999/040942.

[1148] The instant compositions may further comprise, for example, micelles or liposomes, or some other encapsulated form, or may be administered in an extended release form to provide a prolonged storage and/or delivery effect. The disclosed pharmaceutical formulations may be administered according to any regime including, for example, daily (1 time per day, 2 times per day, 3 times per day, 4 times per day, 5 times per day, 6 times per day), every two days, every three days, every four days, every five days, every six days, weekly, bi-weekly, every three weeks, monthly, or bi-monthly.

### Uses

[1149] Based on the information provided for the first time herein, it is contemplated that the Q-L-Y conjugates described herein and related pharmaceutical compositions are useful for treatment of a disease or medical condition, in which e.g., the lack of activity at the glucagon receptor, the GLP-1 receptor, the GIP receptor or a combination of any of the foregoing, is a factor in the onset and/or progression of the disease or medical condition. Accordingly, the invention provides a method of treating or preventing a disease or medical condition in a patient, wherein the disease or medical condition is a disease of medical condition in which a lack of GLP-1 receptor activation and/or glucagon receptor activation and/or GIP activation is associated with the onset and/or progression of the disease of medical condition. The method comprises providing to the patient an conjugate in accordance with any of those described herein in an amount effective to treat or prevent the disease or medical condition.

[1150] In some embodiments, the disease or medical condition is metabolic syndrome. Metabolic Syndrome, also known as metabolic syndrome X, insulin resistance syndrome or Reaven's syndrome, is a disorder that affects over 50 million Americans. Metabolic Syndrome is typically characterized by a clustering of at least three or more of the following risk factors: (1) abdominal obesity (excessive fat tissue in and around the abdomen), (2) atherogenic dyslipidemia (blood fat disorders including high triglycerides, low HDL cholesterol and high LDL cholesterol that enhance the accumulation of plaque in the artery walls), (3) elevated blood pressure, (4) insulin resistance or glucose intolerance, (5) prothrombotic state (e.g., high fibrinogen or plasminogen activator inhibitor-1 in blood), and (6) pro-inflammatory state (e.g., elevated C-reactive protein in blood). Other risk factors may include aging, hormonal imbalance and genetic predisposition.

[1151] Metabolic Syndrome is associated with an increased the risk of coronary heart disease and other disorders related to the accumulation of vascular plaque, such as stroke and peripheral vascular disease, referred to as atherosclerotic cardiovascular disease (ASCVD). Patients with Metabolic Syndrome may progress from an insulin resistant state in its early stages to full blown type II diabetes with further increasing risk of ASCVD. Without intending to be bound by any particular theory, the relationship between insulin resistance, Metabolic Syndrome and vascular disease may involve one or more concurrent pathogenic mechanisms including impaired insulin-stimulated vasodilation, insulin resistance-associated reduction in NO availability due to enhanced oxidative stress, and abnormalities in adipocyte-derived hormones such as adiponectin (Lteif and Mather, Can. J. Cardiol. 20 (suppl. B):66B-76B (2004)).

[1152] According to the 2001 National Cholesterol Education Program Adult Treatment Panel (ATP III), any three of the following traits in the same individual meet the criteria for Metabolic Syndrome: (a) abdominal obesity (a waist circumference over 102 cm in men and over 88 cm in women); (b) serum triglycerides (150 mg/dl or above); (c) HDL cholesterol (40 mg/dl or lower in men and 50 mg/dl or lower in women); (d) blood pressure (130/85 or more); and (e) fasting blood glucose (110 mg/dl or above). According to the World Health Organization (WHO), an individual having high insulin levels (an elevated fasting blood glucose or an elevated post meal glucose alone) with at least two of the following criteria meets the criteria for Metabolic Syndrome: (a) abdominal obesity (waist to hip ratio of greater than 0.9, a body mass index of at least 30 kg/m2, or a waist measurement over 37 inches); (b) cholesterol panel showing a triglyceride level of at least 150 mg/dl or an HDL cholesterol lower than 35 mg/dl; (c) blood pressure of 140/90 or more, or on treatment for high blood pressure). (Mathur, Ruchi, “Metabolic Syndrome,” ed. Shiel, Jr., William C., MedicineNet.com, May 11, 2009).

[1153] For purposes herein, if an individual meets the criteria of either or both of the criteria set forth by the 2001 National Cholesterol Education Program Adult Treatment Panel or the WHO, that individual is considered as afflicted with Metabolic Syndrome.

[1154] Without being bound to any particular theory, Q-L-Y conjugates described herein are useful for treating Metabolic Syndrome. Accordingly, the invention provides a method of preventing or treating Metabolic Syndrome, or reducing one, two, three or more risk factors thereof, in a subject, comprising providing to the subject a conjugate described herein in an amount effective to prevent or treat Metabolic Syndrome, or the risk factor thereof.

[1155] In some embodiments, the method treats a hyperglycemic medical condition. In certain aspects, the hyperglycemic medical condition is diabetes, diabetes mellitus type I, diabetes mellitus type II, or gestational diabetes, either insulin-dependent or non-insulin-dependent. In some aspects, the method treats the hyperglycemic medical condition by reducing one or more complications of diabetes including nephropathy, retinopathy and vascular disease.

[1156] In some aspects, the disease or medical condition is obesity. In some aspects, the obesity is drug-induced obesity. In some aspects, the method treats obesity by preventing or reducing weight gain or increasing weight loss in the patient. In some aspects, the method treats obesity by reducing appetite, decreasing food intake, lowering the levels of fat in the patient, or decreasing the rate of movement of food through the gastrointestinal system.

[1157] Because obesity is associated with the onset or progression of other diseases, the methods of treating obesity are further useful in methods of reducing complications associated with obesity including vascular disease (coronary artery disease, stroke, peripheral vascular disease, ischemia reperfusion, etc.), hypertension, onset of diabetes type II, hyperlipidemia and musculoskeletal diseases. The invention accordingly provides methods of treating or preventing these obesity-associated complications.

[1158] In some embodiments, the disease or medical condition is Nonalcoholic fatty liver disease (NAFLD). NAFLD refers to a wide spectrum of liver disease ranging from simple fatty liver (steatosis), to nonalcoholic steatohepatitis (NASH), to cirrhosis (irreversible, advanced scarring of the liver). All of the stages of NAFLD have in common the accumulation of fat (fatty infiltration) in the liver cells (hepatocytes). Simple fatty liver is the abnormal accumulation of a certain type of fat, triglyceride, in the liver cells with no inflammation or scarring. In NASH, the fat accumulation is associated with varying degrees of inflammation (hepatitis) and scarring (fibrosis) of the liver. The inflammatory cells can destroy the liver cells (hepatocellular necrosis). In the terms “steatohepatitis” and “steatonecrosis”, steato refers to fatty infiltration, hepatitis refers to inflammation in the liver, and necrosis refers to destroyed liver cells. NASH can ultimately lead to scarring of the liver (fibrosis) and then irreversible, advanced scarring (cirrhosis). Cirrhosis that is caused by NASH is the last and most severe stage in the NAFLD spectrum. (Mendler, Michel, “Fatty Liver: Nonalcoholic Fatty Liver Disease (NAFLD) and Nonalcoholic Steatohepatitis (NASH),” ed. Schoenfield, Leslie J., MedicineNet.com, Aug. 29, 2005).

[1159] Alcoholic Liver Disease, or Alcohol-Induced Liver Disease, encompasses three pathologically distinct liver diseases related to or caused by the excessive consumption of alcohol: fatty liver (steatosis), chronic or acute hepatitis, and cirrhosis. Alcoholic hepatitis can range from a mild hepatitis, with abnormal laboratory tests being the only indication of disease, to severe liver dysfunction with complications such as jaundice (yellow skin caused by bilirubin retention), hepatic encephalopathy (neurological dysfunction caused by liver failure), ascites (fluid accumulation in the abdomen), bleeding esophageal varices (varicose veins in the esophagus), abnormal blood clotting and coma. Histologically, alcoholic hepatitis has a characteristic appearance with ballooning degeneration of hepatocytes, inflammation with neutrophils and sometimes Mallory bodies (abnormal aggregations of cellular intermediate filament proteins). Cirrhosis is characterized anatomically by widespread nodules in the liver combined with fibrosis. (Worman, Howard J., “Alcoholic Liver Disease”, Columbia University Medical Center website).

[1160] Without being bound to any particular theory, the Q-L-Y conjugates described herein are useful for the treatment of Alcoholic Liver Disease, NAFLD, or any stage thereof, including, for example, steatosis, steatohepatitis, hepatitis, hepatic inflammation, NASH, cirrhosis, or complications thereof. Accordingly, the invention provides a method of preventing or treating Alcoholic Liver Disease, NAFLD, or any stage thereof, in a subject comprising providing to a subject a conjugate described herein in an amount effective to prevent or treat Alcoholic Liver Disease, NAFLD, or the stage thereof. Such treatment methods include reduction in one, two, three or more of the following: liver fat content, incidence or progression of cirrhosis, incidence of hepatocellular carcinoma, signs of inflammation, e.g., abnormal hepatic enzyme levels (e.g., aspartate aminotransferase AST and/or alanine aminotransferase ALT, or LDH), elevated serum ferritin, elevated serum bilirubin, and/or signs of fibrosis, e.g., elevated TGF-beta levels. In preferred embodiments, the Q-L-Y conjugates described herein are used treat patients who have progressed beyond simple fatty liver (steatosis) and exhibit signs of inflammation or hepatitis. Such methods may result, for example, in reduction of AST and/or ALT levels.

[1161] GLP-1 and exendin-4 have been shown to have some neuroprotective effect. The invention also provides uses of the Q-L-Y conjugates described herein in treating neurodegenerative diseases, including but not limited to Alzheimer's disease, Parkinson's disease, Multiple Sclerosis, Amylotrophic Lateral Sclerosis, other demyelination related disorders, senile dementia, subcortical dementia, arteriosclerotic dementia, AIDS-associated dementia, or other dementias, a central nervous system cancer, traumatic brain injury, spinal cord injury, stroke or cerebral ischemia, cerebral vasculitis, epilepsy, Huntington's disease, Tourette's syndrome, Guillain Barre syndrome, Wilson disease, Pick's disease, neuroinflammatory disorders, encephalitis, encephalomyelitis or meningitis of viral, fungal or bacterial origin, or other central nervous system infections, prion diseases, cerebellar ataxias, cerebellar degeneration, spinocerebellar degeneration syndromes, Friedreichs ataxia, ataxia telangiectasia, spinal dysmyotrophy, progressive supranuclear palsy, dystonia, muscle spasticity, tremor, retinitis pigmentosa, striatonigral degeneration, mitochondrial encephalo-myopathies, neuronal ceroid lipofuscinosis, hepatic encephalopathies, renal encephalopathies, metabolic encephalopathies, toxin-induced encephalopathies, and radiation-induced brain damage.

[1162] In some embodiments, the disease or medical condition is hypoglycemia. In some embodiments, the patient is a diabetic patient and the hypoglycemia is induced by the administration of insulin. In specific aspects, the method comprises providing the conjugate of the present disclosure in combination with insulin so that the conjugate buffers the hypoglycemic effects of the bolus administration of insulin.

[1163] In some embodiments, the Q-L-Y conjugates are used in conjunction with parenteral administration of nutrients to non-diabetic patients in a hospital setting, e.g., to patients receiving parenteral nutrition or total parenteral nutrition. Nonlimiting examples include surgery patients, patients in comas, patients with digestive tract illness, or a nonfunctional gastrointestinal tract (e.g. due to surgical removal, blockage or impaired absorptive capacity, Crohn's disease, ulcerative colitis, gastrointestinal tract obstruction, gastrointestinal tract fistula, acute pancreatitis, ischemic bowel, major gastrointestinal surgery, certain congenital gastrointestinal tract anomalies, prolonged diarrhea, or short bowel syndrome due to surgery, patients in shock, and patients undergoing healing processes often receive parenteral administration of carbohydrates along with various combinations of lipids, electrolytes, minerals, vitamins and amino acids. The Q-L-Y conjugates and the parenteral nutrition composition can be administered at the same time, at different times, before, or after each other, provided that the Q-L-Y conjugate is exerting the desired biological effect at the time that the parenteral nutrition composition is being digested. For example, the parenteral nutrition may be administered, 1, 2 or 3 times per day, while the glucagon conjugate is administered once every other day, three times a week, two times a week, once a week, once every 2 weeks, once every 3 weeks, or once a month.

[1164] As used herein, the terms “treat,” and “prevent” as well as words stemming therefrom, do not necessarily imply 100% or complete treatment or prevention. Rather, there are varying degrees of treatment or prevention of which one of ordinary skill hi the art recognizes as having a potential benefit or therapeutic effect. In this respect, the inventive methods can provide any amount of any level of treatment or prevention of a disease or medical condition in a mammal. Furthermore, the treatment or prevention provided by the method can include treatment or prevention of one or more conditions or symptoms of the disease or medical condition. For example, with regard to methods of treating obesity, the method in some embodiments, achieves a decrease in food intake by or fat levels in a patient. Also, for purposes herein, “prevention” can encompass delaying the onset of the disease, or a symptom or condition thereof.

[1165] With regard to the above methods of treatment, the patient is any host. In some embodiments, the host is a mammal. As used herein, the term “mammal” refers to any vertebrate animal of the mammalia class, including, but not limited to, any of the monotreme, marsupial, and placental taxas. In some embodiments, the mammal is one of the mammals of the order Rodentia, such as mice and hamsters, and mammals of the order Logomorpha, such as rabbits. In certain embodiments, the mammals are from the order Carnivora, including Felines (cats) and Canines (dogs). In certain embodiments, the mammals are from the order Artiodactyla, including Bovines (cows) and S wines (pigs) or of the order Perssodactyla, including Equines (horses). In some instances, the mammals are of the order Primates, Ceboids, or Simoids (monkeys) or of the order Anthropoids (humans and apes). In particular embodiments, the mammal is a human.

### Combinations

[1166] The Q-L-Y conjugates described herein may be administered alone or in combination with other therapeutic agents which aim to treat or prevent any of the diseases or medical conditions described herein. For example, the Q-L-Y conjugates described herein may be co-administered with (simultaneously or sequentially) an anti-diabetic or anti-obesity agent. Anti-diabetic agents known in the art or under investigation include insulin, leptin, Peptide YY (PYY), Pancreatic Peptide (PP), fibroblast growth factor 21 (FGF21), Y2Y4 receptor agonists, sulfonylureas, such as tolbutamide (Orinase), acetohexamide (Dymelor), tolazamide (Tolinase), chlorpropamide (Diabinese), glipizide (Glucotrol), glyburide (Diabeta, Micronase, Glynase), glimepiride (Amaryl), or gliclazide (Diamicron); meglitinides, such as repaglinide (Prandin) or nateglinide (Starlix); biguanides such as metformin (Glucophage) or phenformin; thiazolidinediones such as rosiglitazone (Avandia), pioglitazone (Actos), or troglitazone (Rezulin), or other PPARy inhibitors; alpha glucosidase inhibitors that inhibit carbohydrate digestion, such as miglitol (Glyset), acarbose (Precose/Glucobay); exenatide (Byetta) or pramlintide; Dipeptidyl peptidase-4 (DPP-4) inhibitors such as vildagliptin or sitagliptin; SGLT (sodium-dependent glucose transporter 1) inhibitors; glucokinase activators (GKA); glucagon receptor antagonists (GRA); or FBPase (fructose 1,6-bisphosphatase) inhibitors.

[1167] Anti-obesity agents known in the art or under investigation include appetite suppressants, including phenethylamine type stimulants, phentermine (optionally with fenfluramine or dexfenfluramine), diethylpropion (Tenuate®), phendimetrazine (Prelu-2®, Bontril®), benzphetamine (Didrex®), sibutramine (Meridia®, Reductil®); rimonabant (Acomplia®), other cannabinoid receptor antagonists; oxyntomodulin; fluoxetine hydrochloride (Prozac); Qnexa (topiramate and phentermine), Excalia (bupropion and zonisamide) or Contrave (bupropion and naltrexone); or lipase inhibitors, similar to XENICAL (Orlistat) or Cetilistat (also known as ATL-962), or GT 389-255.

[1168] The Q-L-Y conjugates described herein in some embodiments are co-administered with an agent for treatment of non-alcoholic fatty liver disease or NASH. Agents used to treat non-alcoholic fatty liver disease include ursodeoxycholic acid (a.k.a., Actigall, URSO, and Ursodiol), Metformin (Glucophage), rosiglitazone (Avandia), Clofibrate, Gemfibrozil, Polymixin B, and Betaine.

[1169] The Q-L-Y conjugates described herein in some embodiments are co-administered with an agent for treatment of a neurodegenerative disease, e.g., Parkinson's Disease. Anti-Parkinson's Disease agents are furthermore known in the art and include, but not limited to, levodopa, carbidopa, anticholinergics, bromocriptine, pramipexole, and ropinirole, amantadine, and rasagiline.

[1170] In view of the foregoing, the invention further provides pharmaceutical compositions and kits additionally comprising one of these other therapeutic agents. The additional therapeutic agent may be administered simultaneously or sequentially with the conjugate of the present disclosure. In some aspects, the conjugate is administered before the additional therapeutic agent, while in other aspects, the conjugate is administered after the additional therapeutic agent.

### Kits

[1171] The Q-L-Y conjugates of the present disclosure can be provided in accordance with one embodiment as part of a kit. Accordingly, in some embodiments, a kit for administering a Q-L-Y conjugate to a patient in need thereof is provided wherein the kit comprises a Q-L-Y conjugate as described herein.

[1172] In one embodiment the kit is provided with a device for administering the Q-L-Y conjugate composition to a patient, e.g. syringe needle, pen device, jet injector or other needle-free injector. The kit may alternatively or in addition include one or more containers, e.g., vials, tubes, bottles, single or multi-chambered pre-filled syringes, cartridges, infusion pumps (external or implantable), jet injectors, pre-filled pen devices and the like, optionally containing the glucagon conjugate in a lyophilized form or in an aqueous solution. The kits in some embodiments comprise instructions for use. In accordance with one embodiment the device of the kit is an aerosol dispensing device, wherein the composition is prepackaged within the aerosol device. In another embodiment the kit comprises a syringe and a needle, and in one embodiment the sterile glucagon composition is prepackaged within the syringe.

[1173] The following examples are given merely to illustrate the present invention and not in any way to limit its scope.

### EXAMPLES

### Example 1

### Synthesis of Peptide Fragments of Glucagon Superfamily Peptides

### Materials

[1174] Peptides are synthesized by any procedures known in the art. Exemplary protocols follow. Peptides can be amidated at the C-terminus. MBHA (4-methylbenzhydrylamine polystyrene) resin can be used during peptide synthesis. MBHA resin, 100-180 mesh, 1% divinylbenzene (DVB) cross-linked polystyrene; loading of 0.7-1.0 mmol/g), Boc-protected (tert-butylcarbamates) and Fmoc protected (9-fluoenylmethyl carbamate) amino acids can be purchased from Midwest Biotech. The solid phase peptide syntheses using Boc-protected amino acids can be performed on an Applied Biosystem 430A Peptide Synthesizer. Fmoc protected amino acid synthesis can be performed using the Applied Biosystems Model 433 Peptide Synthesizer. In specific embodiments, the following procedures can be used:

General Peptide Synthesis Protocol with Boc-chemistry Strategy

[1175] Synthesis of peptides using Boc chemistry can be performed on the Applied Biosystem Model 430A Peptide Synthesizer. Synthetic peptides are constructed by sequential addition of amino acids to a cartridge containing 2 mmol of Boc protected amino acid. Specifically, the synthesis can be carried out using 3-(Diethoxy-phosphoryloxy)-3H-benzo[d][1,2,3]triazin-4-one (DEPBT) or HBTU as the coupling agent with single couplings. At the end of the coupling step, the peptidyl-resin is treated with trifluoroacetic acid (TFA) to remove the N-terminal Boc protecting group. The resin is then washed repeatedly with dimethylformamide (DMF) and this repetitive cycle is repeated for the desired number of coupling steps. Boc amino acids and HBTU can be obtained from Midwest Biotech (Fishers, Ind.). General side chain protecting groups that can be used include: Arg(Tos), Asn(Xan), Asp(OcHex), Cys(pMeBzl), His(Bom), Lys(2Cl—Z), Ser(OBzl), Thr(OBzl), Tyr(2Br—Z), and Trp(CHO). Boc-Glu(OFm)-OH and Boc-Lys(Fmoc)-OH (Chem-Impex, Wood dale, IL) is used in the lactam-bridge formation sites.

[1176] After assembly of the peptides, the Fmoc protected side chains are deprotected using 20% piperidine treatment. For the lactamization, orthogonal protecting groups are selected for Glu and Lys (e.g., Glu(Fm), Lys(Fmoc)). After removal of the protecting groups and before HF cleavage, cyclization is performed as described previously (see, e.g., International Patent Application Publication No. WO2008/101017). HF treatment of the peptidyl-resin

[1177] The peptidyl-resin is treated with anhydrous HF in the presence of p-cresol and dimethyl sulfide, which typically yielded approximately 350 mg (about 50% yield) of a crude deprotected-peptide. Specifically, the peptidyl-resin (30 mg to 200 mg) is placed in a hydrogen fluoride (HF) reaction vessel for cleavage. Then, 500 μL of p-cresol is added to the vessel as a carbonium ion scavenger. The vessel is attached to the HF system and submerged in a methanol/dry ice mixture. The vessel is evacuated with a vacuum pump and 10 mL of HF was distilled into the reaction vessel. This reaction mixture of the peptidyl-resin and the HF was stirred for one hour at 0° C., after which a vacuum was established and the HF is quickly evacuated (10-15 min) The vessel is then removed carefully and filled with approximately 35 mL of ether to precipitate the peptide and to extract the p-cresol and small molecule organic protecting groups resulting from HF treatment. This mixture is filtered utilizing a Teflon filter and repeated twice to remove all excess cresol. This filtrate is discarded. The precipitated peptide is dissolved in approximately 20 mL of 10% acetic acid (aq). This filtrate, which contained the desired peptide, is collected and lyophilized.

[1178] An analytical HPLC analysis of the crude solubilized peptide is conducted under the following conditions [4.6×30 mm Xterra C8, 1.50 mL/min, 220 nm, A buffer 0.1% TFA/10% acetonitrile (CH₃CN), B buffer 0.1% TFA/100% CH₃CN, gradient 5-95% B over 15 minutes]. The extract is diluted twofold with water and loaded onto a 2.2×25 cm Vydac C4 preparative reverse phase column and eluted using an acetonitrile gradient on a Waters HPLC system (A buffer of 0.1% TFA/10% CH₃CN, B buffer of 0.1% TFA/10% CH₃CN and a gradient of 0-100% B over 120 minutes at a flow of 15.00 mL/min. HPLC analysis of the purified peptide demonstrated greater than 95% purity and electrospray ionization mass spectral analysis can be used to confirm the identity of the peptide.

General Peptide Synthesis Protocol with Fmoc-chemistry Strategy:

[1179] Peptides can be synthesized on an ABI 433A automated peptide synthesizer using standard Fmoc chemistry with Rink MBHA amide resin or first amino acid attached Wang resin (Novabiochem, San Diego, Calif.) using DIC/HOBT as coupling reagent. The side chain protecting groups of Nα-Fmoc [N-(9-fluorenyl)methoxycarbonyl]amino acids that can be used include the following: Arg, Pmc; Asp, OtBu; Cys, Trt; Gln, Trt; His, Trt; Lys, Boc; Ser, tBu, Tyr, tBu; and Trp, Boc (Pmc=2,2,5,7,8-pentamethylchoman-6-sulfonyl, OtBu=tert-butyl ester, Trt=trityl, Boc=tert-butyloxycarbonyl, and tBu=tert-butyl ester). Fmoc-Glu(O-2-PhiPr)-OH and Fmoc-Lys(Mmt)-OH (Novabiochem, San Diego, Calif.) are incorporated in the lactam-bridge formation sites.

[1180] After solid phase synthesis, the 2-phenylisopropyl (2-PhiPr) group on the Glu and the 4-methoxytrityl (Mmt) group on the Lys are removed by flashing 1% TFA/DCM though the peptidyl resin. For the lactam-bridge formation, usually 150 mg (0.5 mmole, 5-fold) BEPBT are added in 10% DIEA/DMF and reacted for 2 to 4 h until ninhydrin test shown negative.

[1181] Peptides are cleaved from the resin with cleavage cocktail containing 85% TFA, 5% phenol, 5% water and 5% thioanisole (2.5% EDT is added when peptide contains Cysteine). Crude peptides are precipitated in ether, centrifuged, and lyophilized. Peptides are then analyzed by analytical HPLC and checked by ESI or MALDI-TOF mass spectrometry. Peptides are then purified by the general HPLC purification procedure.

### Peptide Acylation

[1182] Acylated peptides can be prepared as follows. Peptides are synthesized on a solid support resin using either a CS Bio 4886 Peptide Synthesizer or Applied Biosystems 430A Peptide Synthesizer. In situ neutralization chemistry can be used as described by Schnolzer et al., Int. J. Peptide Protein Res. 40: 180-193 (1992). For acylated peptides, the target amino acid residue to be acylated (e.g., position ten, relative to the amino acid position numbering of SEQ ID NO: 1601) is substituted with an N ε-FMOC lysine residue. Treatment of the completed N-terminally BOC protected peptide with 20% piperidine in DMF for 30 minutes is used to remove FMOC/formyl groups. Coupling to the free ε-amino Lys residue is achieved by reacting a ten-fold molar excess of either an FMOC-protected spacer amino acid (ex. FMOC-Glu-OtBu) or acyl chain (e.g. CH₃(CH₂)₁₄—COOH) and benzotriazol-1-yl-oxytripyrrolidinophosphonium hexafluorophosphate (PyBOP), N,N′ diisopropylcarbodiimide (DIC), or DEPBT coupling reagent in DMF/diisopropylethylamine (DIEA). Subsequent removal of the spacer amino acid's FMOC group is followed by repetition of coupling with an acyl chain. Final treatment with 100% TFA resulted in removal of any side chain protecting groups and the N-terminal BOC group. Peptide resins are neutralized with 5% DIEA/DMF, dried, and then cleaved from the support using HF/p-cresol, 95:5, at 0° C. for one hour. Following ether extraction, a 5% acetic acid (HOAc) solution is used to solvate the crude peptide. A sample of the solution was then verified to contain the correct molecular weight peptide by ESI-MS. Correct peptides are typically purified by reverse phase (RP)HPLC using a linear gradient of 10% CH₃CN/0.1% TFA to 0.1% TFA in 100% CH₃CN. A Vydac C18 22 mm×250 mm protein column can be used for the purification. Acylated peptide conjugates generally completed elution by a buffer ratio of 20:80. Portions can be pooled together and checked for purity on an analytical RP-HPLC. Pure fractions are lyophilized yielding white, solid peptides.

[1183] If a peptide comprised a lactam bridge and target residues to be acylated, acylation can be carried out as described above upon addition of that amino acid to the peptide backbone.

### Peptide PEGylation to Form Thioether Linkages

[1184] For peptide PEGylation, 40 kDa methoxy poly(ethylene glycol) idoacetamide is reacted with a molar equivalent of peptide in 7M Urea, 50 mM Tris-HCl buffer using the minimal amount of solvent needed to dissolve both peptide and PEG into a clear solution (generally less than 2 mL for a reaction using 2 to 3 mg peptide). Vigorous stirring at room temperature is commenced for 4 to 6 hours and the reaction can be analyzed by analytical RP-HPLC. PEGylated products appeared distinctly from the starting material with decreased retention times. Purification can be performed on a Vydac C4 column with conditions similar to those used for the initial peptide purification. Elution occurs around buffer ratios of 50:50. Fractions of pure PEGylated peptide are isolated and lyophilized. Yields will be above 50%, varying per reaction.

### Peptide PEGylation to Form Maleimido Linkages

[1185] For peptide PEGylation, the peptide containing a cysteine is dissolved in phosphate buffered saline (5- to 0 mg/mL) and 0.01 Methylenediamine tetraacetic acid is added (10-15% of total volume). Excess (2-fold) maleimido methoxyPEG reagent (Dow) is added and the reaction is stirred at room temperature while monitoring reaction progress by high performance liquid chromatography (HPLC). After 8-24 hrs, the reaction mixture is acidified and loaded onto a preparative reverse phase column for purification using 0.1% tetrafluoroacetic acid (TFA)/acetonitrile in the gradient mode. The appropriate fractions are combined and lyophilized to give the desired pegylated derivatives.

### Analysis Using Mass Spectrometry

[1186] Mass spectra are obtained using a Sciex API-III electrospray quadrapole mass spectrometer with a standard ESI ion source. Ionization conditions that are used are as follows: ESI in the positive-ion mode; ion spray voltage, 3.9 kV; orifice potential, 60 V. The nebulizing and curtain gas used is nitrogen flow rate of 0.9 L/min Mass spectra are recorded from 600-1800 Thompsons at 0.5 Th per step and 2 msec dwell time. The sample (about 1 mg/mL) is dissolved in 50% aqueous acetonitrile with 1% acetic acid and introduced by an external syringe pump at the rate of 5 μL/min

[1187] When the peptides are analyzed in PBS solution by ESI MS, they are first desalted using a ZipTip solid phase extraction tip containing 0.6 μL C4 resin, according to instructions provided by the manufacturer (Millipore Corporation, Billerica, Mass., see the Millipore website of the world wide web at millipore.com/catalogue.nsf/docs/C5737).

### High Performance Liquid Chromatography (HPLC) Analysis:

[1188] Preliminary analyses are performed with these crude peptides to get an approximation of their relative conversion rates in Phosphate Buffered Saline (PBS) buffer (pH, 7.2) using high performance liquid chromatography (HPLC) and MALDI analysis. The crude peptide samples are dissolved in the PBS buffer at a concentration of 1 mg/mL. 1 mL of the resulting solution is stored in a 1.5 mL HPLC vial which is then sealed and incubated at 37° C. Aliquots of 100 μl are drawn out at various time intervals, cooled to room temperature and analyzed by HPLC.

[1189] The HPLC analyses are performed using a Beckman System Gold Chromatography system using a UV detector at 214 nm HPLC analyses are performed on a 150 mm×4.6 mm C18 Vydac column The flow rate is 1 mL/min. Solvent A contained 0.1% TFA in distilled water, and solvent B contained 0.1% TFA in 90% CH₃CN. A linear gradient is employed (40% to 70% B in 15 minutes). The data are collected and analyzed using Peak Simple Chromatography software.

### Example 2

[1190] The ability of each peptide to induce cAMP can be measured in a firefly luciferase-based reporter assay. The cAMP production that is induced is directly proportional to the glucagon fragment binding to the glucagon receptor or GIP receptor or GLP-1 receptor. HEK293 cells co-transfected with the receptor and luciferase gene linked to a cAMP responsive element are employed for the bioassay.

[1191] The cells are serum-deprived by culturing 16 hours in Dulbecco-modified Minimum Essential Medium (Invitrogen, Carlsbad, Calif.) supplemented with 0.25% Bovine Growth Serum (HyClone, Logan, Utah) and then incubated with serial dilutions of glucagon fragments for 5 hours at 37° C., 5% CO₂ in 96 well poly-D-Lysine-coated “Biocoat” plates (BD Biosciences, San Jose, Calif.). At the end of the incubation, 100 μL of LucLite luminescence substrate reagent (Perkin Elmer, Wellesley, Mass.) is added to each well. The plate is shaken briefly, incubated 10 min in the dark and light output was measured on MicroBeta-1450 liquid scintillation counter (Perkin-Elmer, Wellesley, Mass.). The effective 50% concentrations (EC₅₀) and inhibitory 50% concentrations (IC₅₀) are calculated by using Origin software (OriginLab, Northampton, Mass.).

### Example 3

[1192] Diet-induced obesity mice are administered subcutaneous injections once per day for two weeks with vehicle or 40 or 400 μg/kg of one of the following:

[1193] (a) GLP-1 agonist,

[1194] (b) GLP-1 agonist stably linked to Y,

[1195] (c) GLP-1 agonist with a labile linkage to Y, or

[1196] (d) GLP-1 agonist with a metastable linkage to Y.

[1197] Body weight is measured after 14 days and the change in body weight is determined Mice that are administered the GLP-1 agonist conjugates experience a greater decrease in body weight than mice that are administered the GLP-1 agonist alone.

[1198] The effect of the conjugates on cumulative food intake over a period of 14 days is also determined Mice that are administered the GLP-1 agonist conjugates consume less food than mice that are administered the GLP-1 agonist alone.

[1199] The effect of the conjugates on the change in blood glucose is determined. Mice that are administered the GLP-1 agonist conjugates experience a greater decrease in blood glucose levels over the course of the study than mice that are administered the GLP-1 agonist alone.

### Example 4

[1200] Diet-induced obesity mice are administered subcutaneous injections once per day for two weeks with vehicle or 40 or 400 μg/kg of one of the following:

[1201] (a) GLP-1 agonist,

[1202] (b) GLP-1 agonist stably linked to a β3 adrenergic receptor agonist,

[1203] (c) GLP-1 agonist with a labile linkage to a β3 adrenergic receptor agonist,

[1204] (d) GLP-1 agonist stably linked to a nicotinic acetylcholine receptor agonist, or

[1205] (e) GLP-1 agonist with a labile linkage to a nicotinic acetylcholine receptor agonist.

[1206] Body weight is measured after 14 days and the change in body weight is determined Mice that are administered the GLP-1 agonist conjugates experience a greater decrease in body weight than mice that are administered the GLP-1 agonist alone.

[1207] The effect of the conjugates on cumulative food intake over a period of 14 days is also determined Mice that are administered the GLP-1 agonist conjugates consume less food than mice that are administered the GLP-1 agonist alone.

[1208] The effect of the conjugates on the change in blood glucose is determined Mice that are administered the GLP-1 agonist conjugates experience a greater decrease in blood glucose levels over the course of the study than mice that are administered the GLP-1 agonist alone.

MEGA

The application's sequence listing, which the Patent Office published only in electronic form, follows.

SEQUENCE LISTING (1650 sequences)

SEQ ID NO: 1 - protein, 29 aa, Homo sapiens
HSQGTFTSDYSKYLDSRRAQDFVQWLMNT

SEQ ID NO: 2 - protein, 29 aa, Artificial Sequence
  Synthetic Glucagon Analogue
  MOD_RES (16)..(16): Glu, Gln, homoglutamic acid or homocysteic acid
  MOD_RES (17)..(17): Arg, Cys, Orn, homocysteine or acetyl phenylalanine
  MOD_RES (27)..(27): Met, Leu or Nle
HSQGTFTSDYSKYLDXXRAQDFVQWLXNT

SEQ ID NO: 3 - protein, 29 aa, Artificial Sequence
  Synthetic Glucagon Analogue
  MOD_RES (16)..(16): Glu, Gln, homoglutamic acid or homocysteic acid
  MOD_RES (21)..(21): Asp, Cys, Orn, homocysteine or acetyl phenyalanine
  MOD_RES (27)..(27): Met, Leu or Nle
HSQGTFTSDYSKYLDXRRAQXFVQWLXNT

SEQ ID NO: 4 - protein, 29 aa, Artificial Sequence
  Synthetic Glucagon Analogue
  MOD_RES (16)..(16): Glu, Gln, homoglutamic acid or homocysteic acid
  MOD_RES (24)..(24): Gln, Cys, Orn, homocysteine or acetyl phenylalanine
  MOD_RES (27)..(27): Met, Leu or Nle
HSQGTFTSDYSKYLDXRRAQDFVXWLXNT

SEQ ID NO: 5 - protein, 29 aa, Artificial Sequence
  Synthetic Glucagon Analogue
  MOD_RES (16)..(16): Glu, Gln, homoglutamic acid or homocysteic acid
  MOD_RES (21)..(21): Asp, Cys, Orn, homocysteine or acetyl phenyalanine
  MOD_RES (24)..(24): Gln, Cys, Orn, homocysteine or acetyl phenyalanine
  MOD_RES (27)..(27): Met, Leu or Nle
HSQGTFTSDYSKYLDXRRAQXFVXWLXNT

SEQ ID NO: 6 - protein, 29 aa, Artificial Sequence
  Synthetic Glucagon Analogue
  MOD_RES (21)..(21): Asp, Cys, Orn, homocysteine or acetyl phenyalanine
  MOD_RES (27)..(27): Met, Leu or Nle
HSQGTFTSDYSKYLDERRAQXFVQWLXNT

SEQ ID NO: 7 - protein, 29 aa, Artificial Sequence
  Synthetic Glucagon Analogue
  MOD_RES (24)..(24): Gln, Cys, Orn, homocysteine or acetyl phenylalanine
  MOD_RES (27)..(27): Met, Leu or Nle
HSQGTFTSDYSKYLDERRAQDFVXWLXNT

SEQ ID NO: 8 - protein, 29 aa, Artificial Sequence
  Synthetic Glucagon Analogue
  MOD_RES (16)..(16): Glu, Gln, homoglutamic acid or homocysteic acid
HSQGTFTSDYSKYLDXRRAQDFVQWLMNT

SEQ ID NO: 9 - protein, 29 aa, Artificial Sequence
  Synthetic Glucagon Analogue
  MOD_RES (27)..(27): Met, Leu or Nle
HSQGTFTSDYSKYLDERRAQDFVQWLXNT

SEQ ID NO: 10 - protein, 29 aa, Artificial Sequence
  Synthetic Glucagon Analogue
HSQGTFTSDYSKYLDERRAQDFVQWLMNT

SEQ ID NO: 11 - protein, 29 aa, Artificial Sequence
  Synthetic Glucagon Analogue
  MISC_FEATURE: c-term amidation
HSQGTFTSDYSKYLDERRAQDFVQWLMNT

SEQ ID NO: 12 - protein, 29 aa, Artificial Sequence
  Synthetic Glucagon Analogue
  MISC_FEATURE (12)..(16): Lactam ring between side chains at position 12 and 16
HSQGTFTSDYSKYLDERRAQDFVQWLMNT

SEQ ID NO: 13 - protein, 29 aa, Artificial Sequence
  Synthetic Glucagon Analogue
  MISC_FEATURE (16)..(20): Lactam ring between side chains at positions 16 and 20
HSQGTFTSDYSKYLDERRAKDFVQWLMNT

SEQ ID NO: 14 - protein, 29 aa, Artificial Sequence
  Synthetic Glucagon Analogue
  MISC_FEATURE (22)..(24): Lactam ring between side chains at positions 22 and 24
HSQGTFTSDYSKYLDSRRAKDFVEWLMNT

SEQ ID NO: 15 - protein, 29 aa, Artificial Sequence
  Synthetic Glucagon Analogue
  MISC_FEATURE (24)..(28): Lactam ring formed between side chains at positions 24 and 28
HSQGTFTSDYSKYLDSRRAQDFVEWLMKT

SEQ ID NO: 16 - protein, 29 aa, Artificial Sequence
  Synthetic Glucagon Analogue
  MISC_FEATURE (12)..(16): Lactam ring between side chains at positions 12 and 16
  MISC_FEATURE (20)..(24): Lactam ring between side chains at positions 20 and 24
HSQGTFTSDYSKYLDERRAKDFVEWLMNT

SEQ ID NO: 17 - protein, 29 aa, Artificial Sequence
  Synthetic Glucagon Analogue
  MISC_FEATURE (16)..(20): Lactam ring between side chains at positions 16 and 20
  MISC_FEATURE (24)..(28): Lactam ring between side chains at positions 24 and 28
HSQGTFTSDYSKYLDERRADDFVEWLMKT

SEQ ID NO: 18 - protein, 29 aa, Artificial Sequence
  Synthetic Glucagon Analogue
  MISC_FEATURE (16)..(20): Lactam ring between side chains at positions 16 and 20
HSQGTFTSDYSKYLDERRAKDFVEWLMKT

SEQ ID NO: 19 - protein, 30 aa, Artificial Sequence
  Synthetic Glucagon Analogue
  MISC_FEATURE: c-term amidation
  MOD_RES (30)..(30): Variable amino acid
HSQGTFTSDYSKYLDERRAQDFVQWLMNTX

SEQ ID NO: 20 - protein, 29 aa, Artificial Sequence
  Synthetic Glucagon Analogue
  MOD_RES (16)..(16): Ser, Glu, Gln, homoglutamic acid or homocysteic acid
  MOD_RES (20)..(20): Gln, Lys, Arg, Orn or Citrulline
  MOD_RES (24)..(24): Gln or Glu
  MOD_RES (28)..(28): Asn, Asp or Lys
  MOD_RES (29)..(29): Thr or Gly
HSQGTFTSDYSKYLDXRRAXDFVXWLMXX

SEQ ID NO: 21 - protein, 29 aa, Artificial Sequence
  Synthetic Glucagon Analogue
  MISC_FEATURE: c-term amidation
  MOD_RES (2)..(2): Xaa is D-Ser, Ala, Gly, N-methyl Ser or AIB
HXQGTFTSDYSKYLDERRAQDFVQWLMNT

SEQ ID NO: 22 - protein, 29 aa, Artificial Sequence
  Synthetic Glucagon Analogue
  MISC_FEATURE: c-term amidation
  MOD_RES (2)..(2): Xaa is AIB
HXQGTFTSDYSKYLDERRAQDFVQWLMNT

SEQ ID NO: 23 - protein, 29 aa, Artificial Sequence
  Synthetic Glucagon Analogue
  MISC_FEATURE: c-term amidation
  MOD_RES (17)..(17): Cys-PEG
  MOD_RES (27)..(27): Met, Leu or Nle
HSQGTFTSDYSKYLDECRAQDFVQWLXNT

SEQ ID NO: 24 - protein, 29 aa, Artificial Sequence
  Synthetic Glucagon Analogue
  MISC_FEATURE: c-term amidation
  MOD_RES (21)..(21): Cys-PEG
  MOD_RES (27)..(27): Met, Leu or Nle
HSQGTFTSDYSKYLDERRAQCFVQWLXNT

SEQ ID NO: 25 - protein, 29 aa, Artificial Sequence
  Synthetic Glucagon Analogue
  MISC_FEATURE: c-term amidation
  MOD_RES (24)..(24): Cys-PEG
  MOD_RES (27)..(27): Met, Leu or Nle
HSQGTFTSDYSKYLDERRAQDFVCWLXNT

SEQ ID NO: 26 - protein, 10 aa, Artificial Sequence
  Synthetic peptide fragment representing the carboxy terminal 10 amino acids Exendin-4
GPSSGAPPPS

SEQ ID NO: 27 - protein, 8 aa, Artificial Sequence
  Synthetic peptide fragment representing the carboxy terminal 8 amino acids of oxyntomodulin
KRNRNNIA

SEQ ID NO: 28 - protein, 4 aa, Artificial Sequence
  Synthetic peptide
KRNR

SEQ ID NO: 29 - protein, 10 aa, Artificial Sequence
  Synthetic peptide fragment representing the carboxy terminal 10 amino acids of Exendin-4
  MISC_FEATURE: c-term amidation
GPSSGAPPPS

SEQ ID NO: 30 - protein, 39 aa, Artificial Sequence
  Synthetic Glucagon Analogue
  MOD_RES (27)..(27): Met, Leu or Nle
HSQGTFTSDYSKYLDERRAQDFVQWLXNTGPSSGAPPPS

SEQ ID NO: 31 - protein, 37 aa, Artificial Sequence
  Synthetic Glucagon Analogue
  MOD_RES (27)..(27): Met, Leu or Nle
HSQGTFTSDYSKYLDERRAQDFVQWLXNTKRNRNNIA

SEQ ID NO: 32 - protein, 33 aa, Artificial Sequence
  Synthetic Glucagon Analogue
  MOD_RES (27)..(27): Met, Leu or Nle
HSQGTFTSDYSKYLDERRAQDFVQWLXNTKRNR

SEQ ID NO: 33 - protein, 29 aa, Artificial Sequence
  Synthetic Glucagon Analogue
  MOD_RES (15)..(15): Asp, Glu, homoglutamic acid, cysteic acid or homocysteic acid
  MOD_RES (16)..(16): Ser, Glu, Gln, homoglutamic acid or homocysteic acid
  MOD_RES (20)..(20): Gln or Lys
  MOD_RES (24)..(24): Gln or Glu
  MOD_RES (28)..(28): Asn, Lys or an acidic amino acid
  MOD_RES (29)..(29): Thr, Gly or an acidic amino acid
HSQGTFTSDYSKYLXXRRAXDFVXWLMXX

SEQ ID NO: 34 - protein, 29 aa, Artificial Sequence
  Synthetic Glucagon Analogue
  MOD_RES (15)..(15): Asp, Glu, cysteic acid, homoglutamic acid or homocysteic acid
  MOD_RES (16)..(16): Ser, Glu, Gln, homoglutamic acid or homocysteic acid
  MOD_RES (20)..(20): Gln or Lys
  MOD_RES (24)..(24): Gln or Glu
  MOD_RES (28)..(28): Asn, Asp or Lys
  MOD_RES (29)..(29): Thr or Gly
HSQGTFTSDYSKYLDXRRAXDFVXWLMXX

SEQ ID NO: 35 - protein, 29 aa, Artificial Sequence
  Synthetic Glucagon Analogue
HSQGTFTSDYSKYLDSCRAQDFVQWLMNT

SEQ ID NO: 36 - protein, 39 aa, Artificial Sequence
  Synthetic Glucagon Analogue
HSQGTFTSDYSKYLDSRRAQDFVQWLMNTGPSSGAPPPS

SEQ ID NO: 37 - protein, 29 aa, Artificial Sequence
  Synthetic Glucagon Analogue
  MOD_RES (24)..(24): 2-butyrolactone bound through thiol group of Cys
HSQGTFTSDYSKYLDSRRAQDFVCWLMNT

SEQ ID NO: 38 - protein, 29 aa, Artificial Sequence
  Synthetic Glucagon Analogue
  MOD_RES (24)..(24): Carboxymethyl group bound through thiol group of Cys
HSQGTFTSDYSKYLDSRRAQDFVCWLMNT

SEQ ID NO: 39 - protein, 39 aa, Artificial Sequence
  Synthetic Glucagon Analogue
HSQGTFTSDYSRYLDSRRAQDFVQWLMNTGPSSGAPPPS

SEQ ID NO: 40 - protein, 29 aa, Artificial Sequence
  Synthetic Glucagon Analogue
  MISC_FEATURE: c-term amidation
  MOD_RES (15)..(15): Glu or Asp
  MOD_RES (28)..(28): Glu or Asp
HSQGTFTSDYSKYLXERRAQDFVQWLMXT

SEQ ID NO: 41 - protein, 29 aa, Artificial Sequence
  Synthetic Glucagon Analogue
  MISC_FEATURE: c-term amidation; lactam ring between side chains at positions 12 and 16
  MISC_FEATURE: c-term amidation
  MISC_FEATURE (12)..(16): Lactam ring between side chains at positions 12 and 16
  MOD_RES (15)..(15): Glu or Asp
  MOD_RES (28)..(28): Glu or Asp
HSQGTFTSDYSKYLXERRAQDFVQWLMXT

SEQ ID NO: 42 - protein, 29 aa, Artificial Sequence
  Synthetic Glucagon Analogue
  MISC_FEATURE: c-term amidation; lactam ring between side chains at positions 16 and 20
  MISC_FEATURE: c-term amidation
  MOD_RES (15)..(15): Glu or Asp
  MISC_FEATURE (16)..(20): Lactam ring between side chains at positions 16 and 20
  MOD_RES (28)..(28): Glu or Asp
HSQGTFTSDYSKYLXERRAKDFVQWLMXT

SEQ ID NO: 43 - protein, 29 aa, Artificial Sequence
  Synthetic Glucagon Analogue
  MISC_FEATURE: c-term amidation
  MOD_RES (15)..(15): Glu or Asp
  MISC_FEATURE (20)..(24): Lactam ring between side chains at positions 20 and 24
  MOD_RES (28)..(28): Glu or Asp
HSQGTFTSDYSKYLXSRRAKDFVEWLMXT

SEQ ID NO: 44 - protein, 29 aa, Artificial Sequence
  Synthetic Glucagon Analogue
  MISC_FEATURE: c-term amidation
  MOD_RES (15)..(15): Glu or Asp
  MISC_FEATURE (24)..(28): Lactam ring between side chains at positions 24 and 28
  MOD_RES (29)..(29): Glu or Thr
HSQGTFTSDYSKYLXSRRAQDFVEWLMKX

SEQ ID NO: 45 - protein, 29 aa, Artificial Sequence
  Synthetic Glucagon Analogue
  MOD_RES (12)..(12): Lys or Glu
  MOD_RES (15)..(15): Asp, Glu, homoglutamic acid, cysteic acid or homocysteic acid
  MOD_RES (16)..(16): Ser, Gln, Glu, Lys, homoglutamic acid, cysteic acid or homocysteic acid
  MOD_RES (20)..(20): Gln, Glu or Lys
  MOD_RES (24)..(24): Gln, Lys or Glu
  MOD_RES (28)..(28): Asn, Lys or an acidic amino acid
  MOD_RES (29)..(29): Thr, Gly or an acidic amino acid
HSQGTFTSDYSXYLXXRRAXDFVXWLMXX

SEQ ID NO: 46 - protein, 29 aa, Artificial Sequence
  Synthetic Glucagon Analogue
  MOD_RES (16)..(16): Ser, Glu, Gln, homoglutamic acid or homocysteic acid
  MOD_RES (20)..(20): Gln or Lys
  MOD_RES (24)..(24): Gln or Glu
HSQGTFTSDYSKYLDXRRAXDFVXWLMNT

SEQ ID NO: 47 - protein, 29 aa, Artificial Sequence
  Synthetic Glucagon Analogue
HSQGTFTSDYSKYLDERRAKDFVQWLMNT

SEQ ID NO: 48 - protein, 29 aa, Artificial Sequence
  Synthetic Glucagon Analogue
HSQGTFTSDYSKYLDSRRAKDFVEWLMNT

SEQ ID NO: 49 - protein, 29 aa, Artificial Sequence
  Synthetic Glucagon Analogue
HSQGTFTSDYSKYLDSRRAQDFVEWLMKT

SEQ ID NO: 50 - protein, 31 aa, Homo sapiens
HAEGTFTSDVSSYLEGQAAKEFIAWLVKGRG

SEQ ID NO: 51 - protein, 29 aa, Artificial Sequence
  Synthetic Glucagon Analogue
  MOD_RES (15)..(15): Asp, Glu, homoglutamic acid, cysteic acid or homocysteic acid
  MOD_RES (16)..(16): Ser, Glu, Gln, homoglutamic acid or homocysteic acid
  MOD_RES (20)..(20): Gln, Lys, Arg, Orn, or Citrulline
  MOD_RES (21)..(21): Asp, Glu, homoglutamic acid, or homocysteic acid
  MOD_RES (24)..(24): Gln or Glu
  MOD_RES (28)..(28): Asn, Lys or an acidic amino acid
  MOD_RES (29)..(29): Thr, Gly or an acidic amino acid
HSQGTFTSDYSKYLXXRRAXXFVXWLMXX

SEQ ID NO: 52 - protein, 30 aa, Artificial Sequence
  Synthetic peptide
  MISC_FEATURE: c-term amidation
HAEGTFTSDVSSYLEGQAAKEFIAWLVKGR

SEQ ID NO: 53 - protein, 29 aa, Artificial Sequence
  Synthetic Glucagon Analogue
  MOD_RES (3)..(3): Glu, Orn or Nle
  MOD_RES (15)..(15): Asp, Glu, homoglutamic acid, cysteic acid or homocysteic acid
  MOD_RES (16)..(16): Ser, Glu, Gln, homoglutamic acid or homocysteic acid
  MOD_RES (20)..(20): Gln or Lys
  MOD_RES (24)..(24): Gln or Glu
  MOD_RES (28)..(28): Asn, Lys or an acidic amino acid
  MOD_RES (29)..(29): Thr or an acidic amino acid
HSXGTFTSDYSKYLXXRRAXDFVXWLMXX

SEQ ID NO: 54 - protein, 29 aa, Artificial Sequence
  Synthetic Glucagon Analogue
  MOD_RES (17)..(17): Arg or Gln
  MOD_RES (18)..(18): Arg or Ala
  MOD_RES (21)..(21): Asp or Glu
  MOD_RES (23)..(23): Val or Ile
  MOD_RES (24)..(24): Gln or Ala
HSQGTFTSDYSKYLDEXXAKXFXXWLMNT

SEQ ID NO: 55 - protein, 29 aa, Artificial Sequence
  Synthetic Glucagon Analogue
  MOD_RES (1)..(1): His, D-His, (Des-amino)His, hydroxyl-His, acetyl-His, homo-His or alpha, alpha-dimethyl imidiazole acetic acid (DMIA), N-methyl His, alpha-methyl His, or imidazole acetic acid
  MOD_RES (2)..(2): Ser, D-Ser, Ala, D-Ala, Val, Gly, N-methyl Ser, AIB or N-methyl Ala
  MOD_RES (3)..(3): Gln, Glu, Orn or  Nle
  MOD_RES (10)..(10): Tyr or Trp
  MOD_RES (12)..(12): Lys, Citrulline, Orn or Arg
  MOD_RES (15)..(15): Asp, Glu, cysteic acid, homoglutamic acid and homocysteic acid
  MOD_RES (16)..(16): Ser, Glu, Gln, homoglutamic acid or homocysteic acid
  MOD_RES (17)..(17): Arg, Gln, Lys, Cys, Orn, homocysteine or acetyl phenylalanine
  MOD_RES (18)..(18): Arg, Ala, Lys, Cys, Orn, homocysteine or acetyl phenyalanine
  MOD_RES (20)..(20): Gln, Lys, Arg, Orn or Citrulline
  MOD_RES (21)..(21): Gln, Glu, Asp, Lys, Cys, Orn, homocystein or acetyl phenyalanine
  MOD_RES (23)..(23): Val or Ile
  MOD_RES (24)..(24): Ala, Gln, Glu, Lys, Cys, Orn, homocysteine or acetyl phenyalanine
  MOD_RES (27)..(27): Met, Leu or Nle
  MOD_RES (28)..(28): Asn, Arg, Citrulline, Orn, Lys or Asp
  MOD_RES (29)..(29): Thr, Gly, Lys, Cys, Orn, homocycsteine or acetyl phenyalanine
XXXGTFTSDXSXYLXXXXAXXFXXWLXXX

SEQ ID NO: 56 - protein, 29 aa, Artificial Sequence
  Synthetic Glucagon Analogue
  MOD_RES (1)..(1): His, D-His, (Des-amino)His, hydroxyl-His, acetyl-His, homo-His, DMIA, N-methyl His, alpha-methyl His, or imidazole acetic acid
  MOD_RES (2)..(2): Ser, D-Ser, Ala, D-Ala, Val, Gly, N-methyl Ser, AIB or N-methyl Ala
  MOD_RES (3)..(3): Gln, Glu, Orn or  Nle
  MOD_RES (15)..(15): Asp, Glu, cysteic acid, homoglutamic acid and homocysteic acid
  MOD_RES (16)..(16): Ser, Glu, Gln, homoglutamic acid or homocysteic acid
  MOD_RES (20)..(20): Gln, Lys, Arg, Orn or Citrulline
  MOD_RES (21)..(21): Gln, Glu, Asp, Cys, Orn, homocycstein or acetyl phenyalanine
  MOD_RES (23)..(23): Val or Ile
  MOD_RES (24)..(24): Ala, Gln, Glu, Cys, Orn, homocycsteine or acetyl phenyalanine
  MOD_RES (27)..(27): Met, Leu or Nle
  MOD_RES (28)..(28): Asn, Lys or Asp
  MOD_RES (29)..(29): Thr, Gly, Lys, Cys, Orn, homocycsteine or acetyl phenyalanine
XXXGTFTSDYSKYLXXRRAXXFXXWLXXX

SEQ ID NO: 57 - protein, 29 aa, Artificial Sequence
  Synthetic Glucagon Analogue
  MOD_RES (1)..(1): His, D-His, (Des-amino)His, hydroxyl-His, acetyl- His, homo-His, DMIA, N-methyl His, alpha-methyl His, or imidazole acetic acid
  MOD_RES (2)..(2): Ser, D-Ser, Ala, D-Ala, Val, Gly, N-methyl Ser, AIB or N-methyl Ala
  MOD_RES (3)..(3): Gln, Glu, Orn or  Nle
  MISC_FEATURE (12)..(16): Lactam ring between side changes at position 12 and 16
  MOD_RES (15)..(15): Asp, Glu, cysteic acid, homoglutamic acid and homocysteic acid
  MOD_RES (20)..(20): Gln, Lys, Arg, Orn or Citrulline
  MOD_RES (21)..(21): Gln, Glu, Asp, Cys, Orn, homocycsteine or acetyl phenyalanine
  MOD_RES (23)..(23): Val or Ile
  MOD_RES (24)..(24): Ala, Gln, Glu, Lys, Cys, Orn, homocysteine or acetyl Phe
  MOD_RES (27)..(27): Met, Leu or Nle
  MOD_RES (28)..(28): Asn, Lys or Asp
  MOD_RES (29)..(29): Thr, Gly, Lys, Cys, Orn, homocysteine or acetyl phenyalanine
XXXGTFTSDYSKYLXERRAXXFXXWLXXX

SEQ ID NO: 58 - protein, 29 aa, Artificial Sequence
  Synthetic Glucagon Analogue
  MOD_RES (1)..(1): His, D-His, (Des-amino)His, hydroxyl-His, acetyl-His, homo-His, DMIA, N-methyl His, alpha-methyl His, or imidazole acetic acid
  MOD_RES (2)..(2): Ser, D-Ser, Ala, D-Ala, Val, Gly, N-methyl Ser, AIB or N-methyl Ala
  MOD_RES (3)..(3): Gln, Glu, Orn or Nle
  MOD_RES (15)..(15): Asp, Glu, cysteic acid, homoglutamic acid or homocysteic acid
  MISC_FEATURE (16)..(20): Lactam ring between side chains at positions 16 and 20
  MOD_RES (21)..(21): Gln, Glu, Asp, Lys, Cys, Orn, homocysteine or acetyl phenyalanine
  MOD_RES (23)..(23): Val or Ile
  MOD_RES (24)..(24): Ala, Gln, Glu, Lys, Cys, Orn, homocysteine or acetyl phenyalanine
  MOD_RES (27)..(27): Met, Leu or Nle
  MOD_RES (28)..(28): Asn, Lys or Asp
  MOD_RES (29)..(29): Thr, Gly, Lys, Cys, Orn, homocysteine or acetyl phenyalanine
XXXGTFTSDYSKYLXERRAKXFXXWLXXX

SEQ ID NO: 59 - protein, 29 aa, Artificial Sequence
  Synthetic Glucagon Analogue
  MOD_RES (1)..(1): His, D-His, (Des-amino)His, hydroxyl-His, acetyl-His, homo-His, DMIA, N-methyl His, alpha-methyl His, or imidazole acetic acid
  MOD_RES (2)..(2): Ser, D-Ser, Ala, D-Ala, Val, Gly, N-methyl Ser, AIB, or N-methyl Ala
  MOD_RES (3)..(3): Gln, Glu, Orn or  Nle
  MOD_RES (15)..(15): Asp, Glu, cysteic acid, homoglutamic acid and homocysteic acid
  MOD_RES (16)..(16): Ser, Glu, Gln, homoglutamic acid or homocysteic acid
  MISC_FEATURE (20)..(24): Lactam ring between side chains at position 20 and 24
  MOD_RES (21)..(21): Gln, Glu, Asp, Lys, Cys, Orn, homocysteine or acetyl phenyalanine
  MOD_RES (23)..(23): Val or Ile
  MOD_RES (27)..(27): Met, Leu or Nle
  MOD_RES (28)..(28): Asn, Lys or Asp
  MOD_RES (29)..(29): Thr, Gly, Lys, Cys, Orn, homocysteine or acetyl pheylalanine
XXXGTFTSDYSKYLXXRRAKXFXEWLXXX

SEQ ID NO: 60 - protein, 29 aa, Artificial Sequence
  Synthetic Glucagon Analogue
  MOD_RES (1)..(1): His, D-His, (Des-amino)His, hydroxyl-His, acetyl-His, homo-His, DMIA, N-methyl His, alpha-methyl His, or imidazole acetic acid
  MOD_RES (2)..(2): Ser, D-Ser, Ala, D-Ala, Val, Gly, N-methyl Ser, AIB or N-methyl Ala
  MOD_RES (3)..(3): Gln, Glu, Orn or  Nle
  MOD_RES (15)..(15): Asp, Glu, cysteic acid, homoglutamic acid and homocysteic acid
  MOD_RES (16)..(16): Ser, Glu, Gln, homoglutamic acid or homocysteic acid
  MOD_RES (20)..(20): Gln, Lys, Arg, Orn, or Citrulline
  MOD_RES (21)..(21): Gln, Glu, Asp, Lys, Cys, Orn, homocysteine or acetyl phenyalanine
  MOD_RES (23)..(23): Val or Ile
  MISC_FEATURE (24)..(28): Lactam ring between side chains at position 24 and 28
  MOD_RES (27)..(27): Met, Leu or Nle
  MOD_RES (29)..(29): Thr, Gly, Lys, Cys, Orn, homocysteine or acetyl phenyalanine
XXXGTFTSDYSKYLXXRRAXXFXEWLXKX

SEQ ID NO: 61 - protein, 40 aa, Artificial Sequence
  Synthetic Glucagon Analogue
  MISC_FEATURE: positions 30 to 40 are present only if position 29 is Gly; see specification as filed for detailed description of substitutions and preferred embodiments
  MOD_RES (1)..(1): His, D-His, (Des-amino)His, hydroxyl-His, acetyl-His, homo-His, DMIA, N-methyl His, alpha-methyl His, or imidazole acetic acid
  MOD_RES (2)..(2): Ser, D-Ser, Ala, Val, Gly, N-methyl Ser, Aib, N-methyl, Ala or D-Ala
  MOD_RES (18)..(18): Ala or Arg
  MOD_RES (24)..(24): Ala, Gln or Cys-PEG
  MOD_RES (29)..(29): Thr-CONH2, Cys-PEG, or Gly
  MOD_RES (40)..(40): Cys-PEG or not present
XXQGTFTSDYSKYLDERXAKDFVXWLMNXGPSSGAPPPSC

SEQ ID NO: 62 - protein, 40 aa, Artificial Sequence
  Synthetic Glucagon Analogue
  MISC_FEATURE: positions 30 to 40 are present only if position 29 is Gly; see specification as filed for detailed description of substitutions and preferred embodiments
  MOD_RES (1)..(1): His, D-His, (Des-amino)His, hydroxyl-His, acetyl-His, homo-His, DMIA, N-methyl His, alpha-methyl His, or imidazole acetic acid
  MOD_RES (2)..(2): Ser, D-Ser, Ala, Val, Gly, N-methyl Ser, AIB0, N-methyl Ala, or D-Ala
  MOD_RES (18)..(18): Ala or Arg
  MOD_RES (24)..(24): Ala, Gln or Cys-PEG
  MOD_RES (29)..(29): Thr-CONH2, Cys-PEG, or Gly
  MOD_RES (40)..(40): Cys-PEG or not present
XXQGTFTSDYSKYLDEQXAKEFIXWLMNXGPSSGAPPPSC

SEQ ID NO: 63 - protein, 29 aa, Artificial Sequence
  Synthetic Glucagon Analogue
  MOD_RES (16)..(16): Ser, Glu, Gln, homoglutamic acid or homocysteic acid
  MOD_RES (20)..(20): Gln or Lys
  MOD_RES (21)..(21): Asp, Lys, Cys, Orn, homocysteine or acetyl phealanine
  MOD_RES (24)..(24): Gln, Lys, Cys, Orn, homocysteine or acetyl phealanine
  MOD_RES (27)..(27): Met, Leu or Nle
HSQGTFTSDYSKYLDXRRAXXFVXWLXNT

SEQ ID NO: 64 - protein, 38 aa, Artificial Sequence
  Synthetic Glucagon Analogue
  MOD_RES (15)..(15): Asp, Glu, homoglutamic acid, cysteic acid or homocysteic acid
  MOD_RES (16)..(16): Ser, Glu, Gln, homoglutamic acid or homocysteic acid
  MOD_RES (20)..(20): Gln or Lys
  MOD_RES (24)..(24): Gln or Glu
  MOD_RES (28)..(28): Asn, Lys or Asp
HSQGTFTSDYSKYLXXRRAXDFVXWLMXGGPSSGPPPS

SEQ ID NO: 65 - protein, 11 aa, Artificial Sequence
  Synthetic peptide fragment representing the carboxy terminal 10 amino acids of Exdendin-4
  MOD_RES (11)..(11): Cys-PEG
GPSSGAPPPSC

SEQ ID NO: 66 - protein, 29 aa, Artificial Sequence
  Synthetic Glucagon Analogue
  MISC_FEATURE (12)..(16): Lactam ring between side chains at positions 12 and 16
  MOD_RES (28)..(28): Asp or Asn
  MOD_RES (29)..(29): Thr or Gly
HSQGTFTSDYSKYLDERRAQDFVQWLMXX

SEQ ID NO: 67 - protein, 29 aa, Artificial Sequence
  Synthetic Glucagon Analogue
  MISC_FEATURE (16)..(20): Lactam ring between side chains at positions 16 and 20
  MOD_RES (28)..(28): Asp or Asn
  MOD_RES (29)..(29): Thr or Gly
HSQGTFTSDYSKYLDERRAKDFVQWLMXX

SEQ ID NO: 68 - protein, 29 aa, Artificial Sequence
  Synthetic Glucagon Analogue
  MISC_FEATURE (20)..(24): Lactam ring between side chains at positions 20 and 24
  MOD_RES (28)..(28): Asp or Asn
  MOD_RES (29)..(29): Thr or Gly
HSQGTFTSDYSKYLDSRRAKDFVEWLMXX

SEQ ID NO: 69 - protein, 29 aa, Artificial Sequence
  glucagon analogue
  MISC_FEATURE (24)..(28): Lactam ring between side chains at positions 24 and 28
  MOD_RES (29)..(29): Thr or Gly
HSQGTFTSDYSKYLDSRRAQDFVEWLMKX

SEQ ID NO: 70 - protein, 29 aa, Artificial Sequence
  Synthetic peptide
  MISC_FEATURE: c-term amidation
HSQGTFTSDYSKYLDERRAQDFVQWLMNT

SEQ ID NO: 71 - protein, 29 aa, Artificial Sequence
  Synthetic peptide
  MISC_FEATURE: c-term amidation
HSQGTFTSDYSKYLDERRAKDFVQWLMNT

SEQ ID NO: 72 - protein, 29 aa, Artificial Sequence
  Synthetic peptide
  MISC_FEATURE: c-term amidation
  MISC_FEATURE (16)..(20): Lactam ring between side chains at positions 16 and 20
HSQGTFTSDYSKYLDERRAKDFVQWLMNT

SEQ ID NO: 73 - protein, 29 aa, Artificial Sequence
  Synthetic peptide
  MISC_FEATURE: c-term amidation
  MISC_FEATURE (12)..(16): Lactam ring between side chains at positions 12 and 16
HSQGTFTSDYSKYLDERRAQDFVQWLMNT

SEQ ID NO: 74 - protein, 29 aa, Artificial Sequence
  Synthetic peptide
  MISC_FEATURE: c-term amidation
  MISC_FEATURE (12)..(16): Lactam ring between side chains at positions 12 and 16
HSQGTFTSDYSKYLDERRAKDFVQWLMNT

SEQ ID NO: 75 - protein, 29 aa, Artificial Sequence
  Synthetic peptide
  MISC_FEATURE: c-term amidation
  MISC_FEATURE (16)..(20): Lactam ring between side chains at positions 16 and 20
HSQGTFTSDYSKYLDKRRAEDFVQWLMNT

SEQ ID NO: 76 - protein, 29 aa, Artificial Sequence
  Synthetic peptide
  MISC_FEATURE: c-term amidation
HSQGTFTSDYSKYLDERAAKDFVQWLMNT

SEQ ID NO: 77 - protein, 29 aa, Artificial Sequence
  Synthetic Polypeptide
  MISC_FEATURE: c-term amidation
  MISC_FEATURE (16)..(20): Lactam ring between side chains at positions 16 and 20
HSQGTFTSDYSKYLDERAAKDFVQWLMNT

SEQ ID NO: 78 - protein, 29 aa, Artificial Sequence
  Synthetic Polypeptide
  MISC_FEATURE: c-term amidation
  MISC_FEATURE (12)..(16): Lactam ring between side chains at positions 12 and 16
HSQGTFTSDYSKYLDERAAQDFVQWLMNT

SEQ ID NO: 79 - protein, 29 aa, Artificial Sequence
  Synthetic Polypeptide
  MISC_FEATURE: c-term amidation
  MISC_FEATURE (12)..(16): Lactam ring between side chains at positions 12 and 16
HSQGTFTSDYSKYLDERAAKDFVQWLMNT

SEQ ID NO: 80 - protein, 29 aa, Artificial Sequence
  Synthetic Polypeptide
  MISC_FEATURE: c-term amidation
  MISC_FEATURE (16)..(20): Lactam ring between side chains at positions 16 and 20
HSQGTFTSDYSKYLDKRAAEDFVQWLMNT

SEQ ID NO: 81 - protein, 29 aa, Artificial Sequence
  Synthetic Polypeptide
  MISC_FEATURE: c-term amidation
HSQGTFTSDYSKYLDEQAAKEFIAWLMNT

SEQ ID NO: 82 - protein, 29 aa, Artificial Sequence
  Synthetic Polypeptide
  MISC_FEATURE: c-term amidation
  MISC_FEATURE (12)..(16): Lactam ring between side chains at positions 12 and 16
HSQGTFTSDYSKYLDEQAAKEFIAWLMNT

SEQ ID NO: 83 - protein, 29 aa, Artificial Sequence
  Synthetic Polypeptide
  MISC_FEATURE: c-term amidation
  MISC_FEATURE (16)..(20): Lactam ring between side chains at positions 16 and 20
HSQGTFTSDYSKYLDEQAAKEFIAWLMNT

SEQ ID NO: 84 - protein, 29 aa, Artificial Sequence
  Synthetic Polypeptide
  MISC_FEATURE: c-term amidation
HSQGTFTSDYSKYLDEQAAKEFIAWLVKG

SEQ ID NO: 85 - protein, 29 aa, Artificial Sequence
  Synthetic Polypeptide
  MISC_FEATURE: c-term amidation
  MISC_FEATURE (12)..(16): Lactam ring between side chains at positions 12 and 16
HSQGTFTSDYSKYLDEQAAKEFIAWLVKG

SEQ ID NO: 86 - protein, 29 aa, Artificial Sequence
  Synthetic Polypeptide
  MISC_FEATURE: c-term amidation
  MISC_FEATURE (16)..(20): Lactam ring between side chains at positions 16 and 20
HSQGTFTSDYSKYLDEQAAKEFIAWLVKG

SEQ ID NO: 87 - protein, 29 aa, Artificial Sequence
  Synthetic Polypeptide
  MISC_FEATURE: c-term amidation
  MOD_RES (1)..(1): (Des-amino)His
XSQGTFTSDYSKYLDERRAQDFVQWLMNT

SEQ ID NO: 88 - protein, 29 aa, Artificial Sequence
  Synthetic Polypeptide
  MISC_FEATURE: c-term amidation
  MOD_RES (1)..(1): (Des-amino)His
XSQGTFTSDYSKYLDERRAKDFVQWLMNT

SEQ ID NO: 89 - protein, 29 aa, Artificial Sequence
  Synthetic Polypeptide
  MISC_FEATURE: c-term amidation
  MOD_RES (1)..(1): (Des-amino)His
  MISC_FEATURE (16)..(20): Lactam ring between side chains at positions 16 and 20
XSQGTFTSDYSKYLDERRAKDFVQWLMNT

SEQ ID NO: 90 - protein, 29 aa, Artificial Sequence
  Synthetic Polypeptide
  MISC_FEATURE: c-term amidation
  MOD_RES (1)..(1): (Des-amino)His
  MISC_FEATURE (12)..(16): Lactam ring between side chains at positions 12 and 16
XSQGTFTSDYSKYLDERRAQDFVQWLMNT

SEQ ID NO: 91 - protein, 29 aa, Artificial Sequence
  Synthetic Polypeptide
  MISC_FEATURE: c-term amidation
  MOD_RES (1)..(1): (Des-amino)His
  MISC_FEATURE (12)..(16): Lactam ring between side chains at positions 12 and 16
XSQGTFTSDYSKYLDERRAKDFVQWLMNT

SEQ ID NO: 92 - protein, 29 aa, Artificial Sequence
  Synthetic Polypeptide
  MISC_FEATURE: c-term amidation
  MOD_RES (1)..(1): (Des-amino)His
  MISC_FEATURE (16)..(20): Lactam ring between side chains at positions 16 and 20
XSQGTFTSDYSKYLDKRRAEDFVQWLMNT

SEQ ID NO: 93 - protein, 29 aa, Artificial Sequence
  Synthetic Polypeptide
  MOD_RES (1)..(1): (Des-amino)His
  MISC_FEATURE (29)..(29): c-term amidation
XSQGTFTSDYSKYLDERAAKDFVQWLMNT

SEQ ID NO: 94 - protein, 29 aa, Artificial Sequence
  Synthetic Polypeptide
  MISC_FEATURE: c-term amidation
  MOD_RES (1)..(1): (Des-amino)His
  MISC_FEATURE (16)..(20): Lactam ring between side chains at positions 16 and 20
XSQGTFTSDYSKYLDERAAKDFVQWLMNT

SEQ ID NO: 95 - protein, 29 aa, Artificial Sequence
  Synthetic Polypeptide
  MISC_FEATURE: c-term amidation
  MOD_RES (1)..(1): (Des-amino)His
  MISC_FEATURE (12)..(16): Lactam ring between side chains at positions 12 and 16
XSQGTFTSDYSKYLDERAAQDFVQWLMNT

SEQ ID NO: 96 - protein, 29 aa, Artificial Sequence
  Synthetic Polypeptide
  MISC_FEATURE: c-term amidation
  MOD_RES (1)..(1): (Des-amino)His
  MISC_FEATURE (12)..(16): Lactam ring between side chains at positions 12 and 16
XSQGTFTSDYSKYLDERAAKDFVQWLMNT

SEQ ID NO: 97 - protein, 29 aa, Artificial Sequence
  Synthetic Polypeptide
  MISC_FEATURE: c-term amidation
  MOD_RES (1)..(1): (Des-amino)His
  MISC_FEATURE (16)..(20): Lactam ring between side chains at positions 16 and 20
XSQGTFTSDYSKYLDKRAAEDFVQWLMNT

SEQ ID NO: 98 - protein, 29 aa, Artificial Sequence
  Synthetic Polypeptide
  MISC_FEATURE: c-term amidation
  MOD_RES (1)..(1): (Des-amino)His
  MISC_FEATURE (12)..(16): Lactam ring between side chains at positions 12 and 16
XSQGTFTSDYSKYLDEQAAKEFIAWLMNT

SEQ ID NO: 99 - protein, 29 aa, Artificial Sequence
  Synthetic Polypeptide
  MISC_FEATURE: c-term amidation
  MOD_RES (1)..(1): (Des-amino)His
  MISC_FEATURE (12)..(16): Lactam ring between side chains at positions 12 and 16
XSQGTFTSDYSKYLDEQAAKEFIAWLMNT

SEQ ID NO: 100 - protein, 29 aa, Artificial Sequence
  Synthetic Polypeptide
  MISC_FEATURE: c-term amidation
  MOD_RES (1)..(1): (Des-amino)His
  MISC_FEATURE (16)..(20): Lactam ring between side chains at positions 16 and 20
XSQGTFTSDYSKYLDEQAAKEFIAWLMNT

SEQ ID NO: 101 - protein, 29 aa, Artificial Sequence
  Synthetic Polypeptide
  MISC_FEATURE: c-term amidation
  MOD_RES (1)..(1): (Des-amino)His
XSQGTFTSDYSKYLDEQAAKEFIAWLVKG

SEQ ID NO: 102 - protein, 29 aa, Artificial Sequence
  Synthetic Polypeptide
  MISC_FEATURE: C-terminal amidation
  MOD_RES (1)..(1): (Des-amino)His
  MISC_FEATURE (12)..(16): Lactam ring between side chains at positions 12 and 16
XSQGTFTSDYSKYLDEQAAKEFIAWLVKG

SEQ ID NO: 103 - protein, 29 aa, Artificial Sequence
  Synthetic Polypeptide
  MISC_FEATURE: C-terminal amidation
  MOD_RES (1)..(1): (Des-amino)His
  MISC_FEATURE (16)..(20): Lactam ring between side chains at positions 16 and 20
XSQGTFTSDYSKYLDEQAAKEFIAWLVKG

SEQ ID NO: 104 - protein, 29 aa, Artificial Sequence
  Synthetic Polypeptide
  MOD_RES (2)..(2): Xaa is AIB
  MOD_RES (29)..(29): C-terminal amidation
HXQGTFTSDYSKYLDERRAQDFVQWLMNT

SEQ ID NO: 105 - protein, 29 aa, Artificial Sequence
  Synthetic Polypeptide
  MOD_RES (2)..(2): Xaa is AIB
  MISC_FEATURE (16)..(20): Lactam ring between side chains at positions 16 and 20
  MOD_RES (29)..(29): C-terminal amidation
HXQGTFTSDYSKYLDERRAKDFVQWLMNT

SEQ ID NO: 106 - protein, 29 aa, Artificial Sequence
  Synthetic Polypeptide
  MOD_RES (2)..(2): Xaa is AIB
  MISC_FEATURE (16)..(20): Lactam ring between side chains at positions 16 and 20
  MOD_RES (29)..(29): C-terminal amidation
HXQGTFTSDYSKYLDERRAKDFVQWLMNT

SEQ ID NO: 107 - protein, 29 aa, Artificial Sequence
  Synthetic Polypeptide
  MOD_RES (2)..(2): Xaa is AIB
  MISC_FEATURE (12)..(16): Lactam ring between side chains at positions 12 and 16
  MOD_RES (29)..(29): C-terminal amidation
HXQGTFTSDYSKYLDERRAQDFVQWLMNT

SEQ ID NO: 108 - protein, 29 aa, Artificial Sequence
  Synthetic Polypeptide
  MOD_RES (2)..(2): Xaa is AIB
  MISC_FEATURE (12)..(16): Lactam ring between side chains at positions 12 and 16
  MOD_RES (29)..(29): C-terminal amidation
HXQGTFTSDYSKYLDERRAKDFVQWLMNT

SEQ ID NO: 109 - protein, 29 aa, Artificial Sequence
  Synthetic Polypeptide
  MOD_RES (2)..(2): Xaa is AIB
  MISC_FEATURE (16)..(20): Lactam ring between side chains at positions 16 and 20
  MOD_RES (29)..(29): C-terminal amidation
HXQGTFTSDYSKYLDKRRAEDFVQWLMNT

SEQ ID NO: 110 - protein, 29 aa, Artificial Sequence
  Synthetic Polypeptide
  MOD_RES (2)..(2): Xaa is AIB
  MOD_RES (29)..(29): C-terminal amidation
HXQGTFTSDYSKYLDERAAKDFVQWLMNT

SEQ ID NO: 111 - protein, 29 aa, Artificial Sequence
  Synthetic Polypeptide
  MOD_RES (2)..(2): Xaa is AIB
  MISC_FEATURE (16)..(20): Lactam ring between side chains at positions 16 and 20
  MOD_RES (29)..(29): C-terminal amidation
HXQGTFTSDYSKYLDERAAKDFVQWLMNT

SEQ ID NO: 112 - protein, 29 aa, Artificial Sequence
  Synthetic Polypeptide
  MOD_RES (2)..(2): Xaa is AIB
  MISC_FEATURE (12)..(16): Lactam ring between side chains at positions 12 and 16
  MOD_RES (29)..(29): C-terminal amidation
HXQGTFTSDYSKYLDERAAQDFVQWLMNT

SEQ ID NO: 113 - protein, 29 aa, Artificial Sequence
  glucagon analog
  MOD_RES (2)..(2): Xaa is AIB
  MISC_FEATURE (12)..(16): Lactam ring between side chains at positions 12 and 16
  MOD_RES (29)..(29): C-terminal amidation
HXQGTFTSDYSKYLDERAAKDFVQWLMNT

SEQ ID NO: 114 - protein, 29 aa, Artificial Sequence
  glucagon analog
  MOD_RES (2)..(2): Xaa is AIB
  MISC_FEATURE (16)..(20): Lactam ring between side chains at positions 16 and 20
  MOD_RES (29)..(29): C-terminal amidation
HXQGTFTSDYSKYLDKRAAEDFVQWLMNT

SEQ ID NO: 115 - protein, 29 aa, Artificial Sequence
  glucagon analog
  MOD_RES (2)..(2): Xaa is AIB
  MOD_RES (29)..(29): C-terminal amidation
HXQGTFTSDYSKYLDEQAAKEFIAWLMNT

SEQ ID NO: 116 - protein, 29 aa, Artificial Sequence
  glucagon analog
  MOD_RES (2)..(2): Xaa is AIB
  MISC_FEATURE (12)..(16): Lactam ring between side chains at positions 12 and 16
  MOD_RES (29)..(29): C-terminal amidation
HXQGTFTSDYSKYLDEQAAKEFIAWLMNT

SEQ ID NO: 117 - protein, 29 aa, Artificial Sequence
  glucagon analog
  MOD_RES (2)..(2): Xaa is AIB
  MISC_FEATURE (16)..(20): Lactam ring between side chains at positions 16 and 20
  MOD_RES (29)..(29): C-terminal amidation
HXQGTFTSDYSKYLDEQAAKEFIAWLMNT

SEQ ID NO: 118 - protein, 29 aa, Artificial Sequence
  glucagon analog
  MOD_RES (2)..(2): Xaa is AIB
  MOD_RES (29)..(29): C-terminal amidation
HXQGTFTSDYSKYLDEQAAKEFIAWLVKG

SEQ ID NO: 119 - protein, 29 aa, Artificial Sequence
  glucagon analog
  MOD_RES (2)..(2): Xaa is AIB
  MISC_FEATURE (12)..(16): Lactam ring between side chains at positions 12 and 16
  MOD_RES (29)..(29): C-terminal amidation
HXQGTFTSDYSKYLDEQAAKEFIAWLVKG

SEQ ID NO: 120 - protein, 29 aa, Artificial Sequence
  glucagon analog
  MOD_RES (2)..(2): Xaa is AIB
  MISC_FEATURE (16)..(20): Lactam ring between side chains at positions 16 and 20
  MOD_RES (29)..(29): C-terminal amidation
HXQGTFTSDYSKYLDEQAAKEFIAWLVKG

SEQ ID NO: 121 - protein, 29 aa, Artificial Sequence
  glucagon analog
  MOD_RES (2)..(2): D-Ala
  MOD_RES (29)..(29): C-terminal amidation
HXQGTFTSDYSKYLDERRAQDFVQWLMNT

SEQ ID NO: 122 - protein, 29 aa, Artificial Sequence
  glucagon analog
  MOD_RES (2)..(2): D-Ala
  MOD_RES (29)..(29): C-terminal amidation
HXQGTFTSDYSKYLDERRAKDFVQWLMNT

SEQ ID NO: 123 - protein, 29 aa, Artificial Sequence
  glucagon analog
  MOD_RES (2)..(2): D-Ala
  MISC_FEATURE (16)..(20): Lactam ring between side chains at positions 16 and 20
  MOD_RES (29)..(29): C-terminal amidation
HXQGTFTSDYSKYLDERRAKDFVQWLMNT

SEQ ID NO: 124 - protein, 29 aa, Artificial Sequence
  glucagon analog
  MOD_RES (2)..(2): D-Ala
  MISC_FEATURE (12)..(16): Lactam ring between side chains at positions 12 and 16
  MOD_RES (29)..(29): C-terminal amidation
HXQGTFTSDYSKYLDERRAQDFVQWLMNT

SEQ ID NO: 125 - protein, 29 aa, Artificial Sequence
  glucagon analog
  MOD_RES (2)..(2): D-Ala
  MISC_FEATURE (12)..(16): Lactam ring between side chains at positions 12 and 16
  MOD_RES (29)..(29): C-terminal amidation
HXQGTFTSDYSKYLDERRAKDFVQWLMNT

SEQ ID NO: 126 - protein, 29 aa, Artificial Sequence
  glucagon analog
  MOD_RES (2)..(2): D-Ala
  MISC_FEATURE (16)..(20): Lactam ring between side chains at positions 16 and 20
  MOD_RES (29)..(29): C-terminal amidation
HXQGTFTSDYSKYLDKRRAEDFVQWLMNT

SEQ ID NO: 127 - protein, 29 aa, Artificial Sequence
  glucagon analog
  MOD_RES (2)..(2): D-Ala
  MOD_RES (29)..(29): C-terminal amidation
HXQGTFTSDYSKYLDERAAKDFVQWLMNT

SEQ ID NO: 128 - protein, 29 aa, Artificial Sequence
  glucagon analog
  MOD_RES (2)..(2): D-Ala
  MISC_FEATURE (16)..(20): Lactam ring between side chains at positions 16 and 20
  MOD_RES (29)..(29): C-terminal amidation
HXQGTFTSDYSKYLDERAAKDFVQWLMNT

SEQ ID NO: 129 - protein, 29 aa, Artificial Sequence
  glucagon analog
  MOD_RES (2)..(2): D-Ala
  MISC_FEATURE (12)..(16): Lactam ring between side chains at positions 12 and 16
  MOD_RES (29)..(29): C-terminal amidation
HXQGTFTSDYSKYLDERAAQDFVQWLMNT

SEQ ID NO: 130 - protein, 29 aa, Artificial Sequence
  glucagon analog
  MOD_RES (2)..(2): D-Ala
  MISC_FEATURE (12)..(16): Lactam ring between side chains at positions 12 and 16
  MOD_RES (29)..(29): C-terminal amidation
HXQGTFTSDYSKYLDERAAKDFVQWLMNT

SEQ ID NO: 131 - protein, 29 aa, Artificial Sequence
  glucagon analog
  MOD_RES (2)..(2): D-Ala
  MISC_FEATURE (16)..(20): Lactam ring between side chains at positions 16 and 20
  MOD_RES (29)..(29): C-terminal amidation
HXQGTFTSDYSKYLDKRAAEDFVQWLMNT

SEQ ID NO: 132 - protein, 29 aa, Artificial Sequence
  glucagon analog
  MOD_RES (2)..(2): D-Ala
  MOD_RES (29)..(29): C-terminal amidation
HXQGTFTSDYSKYLDEQAAKEFIAWLMNT

SEQ ID NO: 133 - protein, 29 aa, Artificial Sequence
  glucagon analog
  MOD_RES (2)..(2): D-Ala
  MISC_FEATURE (12)..(16): Lactam ring between side chains at positions 12 and 16
  MOD_RES (29)..(29): C-terminal amidation
HXQGTFTSDYSKYLDEQAAKEFIAWLMNT

SEQ ID NO: 134 - protein, 29 aa, Artificial Sequence
  glucagon analog
  MOD_RES (2)..(2): D-Ala
  MISC_FEATURE (16)..(20): Lactam ring between side chains at positions 16 and 20
  MOD_RES (29)..(29): C-terminal amidation
HXQGTFTSDYSKYLDEQAAKEFIAWLMNT

SEQ ID NO: 135 - protein, 29 aa, Artificial Sequence
  glucagon analog
  MOD_RES (2)..(2): D-Ala
  MOD_RES (29)..(29): C-terminal amidation
HXQGTFTSDYSKYLDEQAAKEFIAWLVKG

SEQ ID NO: 136 - protein, 29 aa, Artificial Sequence
  glucagon analog
  MOD_RES (2)..(2): D-Ala
  MISC_FEATURE (12)..(16): Lactam ring between side chains at positions 12 and 16
  MOD_RES (29)..(29): C-terminal amidation
HXQGTFTSDYSKYLDEQAAKEFIAWLVKG

SEQ ID NO: 137 - protein, 29 aa, Artificial Sequence
  glucagon analog
  MOD_RES (2)..(2): D-Ala
  MISC_FEATURE (16)..(20): Lactam ring between side chains at positions 16 and 20
  MOD_RES (29)..(29): C-terminal amidation
HXQGTFTSDYSKYLDEQAAKEFIAWLVKG

SEQ ID NO: 138 - protein, 29 aa, Artificial Sequence
  glucagon analog
  MOD_RES (29)..(29): C-terminal amidation
HSEGTFTSDYSKYLDERRAQDFVQWLMNT

SEQ ID NO: 139 - protein, 29 aa, Artificial Sequence
  glucagon analog
  MOD_RES (29)..(29): C-terminal amidation
HSEGTFTSDYSKYLDERRAKDFVQWLMNT

SEQ ID NO: 140 - protein, 29 aa, Artificial Sequence
  glucagon analog
  MISC_FEATURE (16)..(20): Lactam ring between side chains at positions 16 and 20
  MOD_RES (29)..(29): C-terminal amidation
HSEGTFTSDYSKYLDERRAKDFVQWLMNT

SEQ ID NO: 141 - protein, 29 aa, Artificial Sequence
  glucagon analog
  MISC_FEATURE (12)..(16): Lactam ring between side chains at positions 12 and 16
  MOD_RES (29)..(29): C-terminal amidation
HSEGTFTSDYSKYLDERRAQDFVQWLMNT

SEQ ID NO: 142 - protein, 29 aa, Artificial Sequence
  glucagon analog
  MISC_FEATURE (12)..(16): Lactam ring between side chains at positions 12 and 16
  MOD_RES (29)..(29): C-terminal amidation
HSEGTFTSDYSKYLDERRAKDFVQWLMNT

SEQ ID NO: 143 - protein, 29 aa, Artificial Sequence
  glucagon analog
  MISC_FEATURE (16)..(20): Lactam ring between side chains at positions 16 and 20
  MOD_RES (29)..(29): C-terminal amidation
HSEGTFTSDYSKYLDKRRAEDFVQWLMNT

SEQ ID NO: 144 - protein, 29 aa, Artificial Sequence
  glucagon analog
  MOD_RES (29)..(29): C-terminal amidation
HSEGTFTSDYSKYLDERAAKDFVQWLMNT

SEQ ID NO: 145 - protein, 29 aa, Artificial Sequence
  glucagon analog
  MISC_FEATURE (16)..(20): Lactam ring between side chains at positions 16 and 20
  MOD_RES (29)..(29): C-terminal amidation
HSEGTFTSDYSKYLDERAAKDFVQWLMNT

SEQ ID NO: 146 - protein, 29 aa, Artificial Sequence
  glucagon analog
  MISC_FEATURE (12)..(16): Lactam ring between side chains at positions 12 and 16
  MOD_RES (29)..(29): C-terminal amidation
HSEGTFTSDYSKYLDERAAQDFVQWLMNT

SEQ ID NO: 147 - protein, 29 aa, Artificial Sequence
  glucagon analog
  MISC_FEATURE (12)..(16): Lactam ring between side chains at positions 12 and 16
  MOD_RES (29)..(29): C-terminal amidation
HSEGTFTSDYSKYLDERAAKDFVQWLMNT

SEQ ID NO: 148 - protein, 29 aa, Artificial Sequence
  glucagon analog
  MISC_FEATURE (16)..(20): Lactam ring between side chains at positions 16 and 20
  MOD_RES (29)..(29): C-terminal amidation
HSEGTFTSDYSKYLDKRAAEDFVQWLMNT

SEQ ID NO: 149 - protein, 29 aa, Artificial Sequence
  glucagon analog
  MOD_RES (29)..(29): C-terminal amidation
HSEGTFTSDYSKYLDEQAAKEFIAWLMNT

SEQ ID NO: 150 - protein, 29 aa, Artificial Sequence
  glucagon analog
  MISC_FEATURE (12)..(16): Lactam ring between side chains at positions 12 and 16
  MOD_RES (29)..(29): C-terminal amidation
HSEGTFTSDYSKYLDEQAAKEFIAWLMNT

SEQ ID NO: 151 - protein, 29 aa, Artificial Sequence
  glucagon analog
  MISC_FEATURE (16)..(20): Lactam ring between side chains at positions 16 and 20
  MOD_RES (29)..(29): C-terminal amidation
HSEGTFTSDYSKYLDEQAAKEFIAWLMNT

SEQ ID NO: 152 - protein, 29 aa, Artificial Sequence
  glucagon analog
  MOD_RES (29)..(29): C-terminal amidation
HSEGTFTSDYSKYLDEQAAKEFIAWLVKG

SEQ ID NO: 153 - protein, 29 aa, Artificial Sequence
  glucagon analog
  MISC_FEATURE (12)..(16): Lactam ring between side chains at positions 12 and 16
  MOD_RES (29)..(29): C-terminal amidation
HSEGTFTSDYSKYLDEQAAKEFIAWLVKG

SEQ ID NO: 154 - protein, 29 aa, Artificial Sequence
  glucagon analog
  MISC_FEATURE (16)..(20): Lactam ring between side chains at positions 16 and 20
  MOD_RES (29)..(29): C-terminal amidation
HSEGTFTSDYSKYLDEQAAKEFIAWLVKG

SEQ ID NO: 155 - protein, 29 aa, Artificial Sequence
  glucagon analog
  MOD_RES (1)..(1): (Des-amino)His
  MOD_RES (29)..(29): C-terminal amidation
XSEGTFTSDYSKYLDERRAQDFVQWLMNT

SEQ ID NO: 156 - protein, 29 aa, Artificial Sequence
  glucagon analog
  MOD_RES (1)..(1): (Des-amino)His
  MOD_RES (29)..(29): C-terminal amidation
XSEGTFTSDYSKYLDERRAKDFVQWLMNT

SEQ ID NO: 157 - protein, 29 aa, Artificial Sequence
  glucagon analog
  MOD_RES (1)..(1): (Des-amino)His
  MISC_FEATURE (16)..(20): Lactam ring between side chains at positions 16 and 20
  MOD_RES (29)..(29): C-terminal amidation
XSEGTFTSDYSKYLDERRAKDFVQWLMNT

SEQ ID NO: 158 - protein, 29 aa, Artificial Sequence
  glucagon analog
  MOD_RES (1)..(1): (Des-amino)His
  MISC_FEATURE (12)..(16): Lactam ring between side chains at positions 12 and 16
  MOD_RES (29)..(29): C-terminal amidation
XSEGTFTSDYSKYLDERRAQDFVQWLMNT

SEQ ID NO: 159 - protein, 29 aa, Artificial Sequence
  glucagon analog
  MOD_RES (1)..(1): (Des-amino)His
  MISC_FEATURE (12)..(16): Lactam ring between side chains at positions 12 and 16
  MOD_RES (29)..(29): C-terminal amidation
XSEGTFTSDYSKYLDERRAKDFVQWLMNT

SEQ ID NO: 160 - protein, 29 aa, Artificial Sequence
  glucagon analog
  MOD_RES (1)..(1): (Des-amino)His
  MISC_FEATURE (16)..(20): Lactam ring between side chains at positions 16 and 20
  MOD_RES (29)..(29): C-terminal amidation
XSEGTFTSDYSKYLDKRRAEDFVQWLMNT

SEQ ID NO: 161 - protein, 29 aa, Artificial Sequence
  glucagon analog
  MOD_RES (1)..(1): (Des-amino)His
  MOD_RES (29)..(29): C-terminal amidation
XSEGTFTSDYSKYLDERAAKDFVQWLMNT

SEQ ID NO: 162 - protein, 29 aa, Artificial Sequence
  glucagon analog
  MOD_RES (1)..(1): (Des-amino)His
  MISC_FEATURE (16)..(20): Lactam ring between side chains at positions 16 and 20
  MOD_RES (29)..(29): C-terminal amidation
XSEGTFTSDYSKYLDERAAKDFVQWLMNT

SEQ ID NO: 163 - protein, 29 aa, Artificial Sequence
  glucagon analog
  MOD_RES (1)..(1): (Des-amino)His
  MISC_FEATURE (12)..(16): Lactam ring between side chains at positions 12 and 16
  MOD_RES (29)..(29): C-terminal amidation
XSEGTFTSDYSKYLDERAAQDFVQWLMNT

SEQ ID NO: 164 - protein, 29 aa, Artificial Sequence
  glucagon analog
  MOD_RES (1)..(1): (Des-amino)His
  MISC_FEATURE (12)..(16): Lactam ring between side chains at positions 12 and 16
  MOD_RES (29)..(29): C-terminal amidation
XSEGTFTSDYSKYLDERAAKDFVQWLMNT

SEQ ID NO: 165 - protein, 29 aa, Artificial Sequence
  glucagon analog
  MOD_RES (1)..(1): (Des-amino)His
  MISC_FEATURE (16)..(20): Lactam ring between side chains at positions 16 and 20
  MOD_RES (29)..(29): C-terminal amidation
XSEGTFTSDYSKYLDKRAAEDFVQWLMNT

SEQ ID NO: 166 - protein, 29 aa, Artificial Sequence
  glucagon analog
  MOD_RES (1)..(1): (Des-amino)His
  MOD_RES (29)..(29): C-terminal amidation
XSEGTFTSDYSKYLDEQAAKEFIAWLMNT

SEQ ID NO: 167 - protein, 29 aa, Artificial Sequence
  glucagon analog
  MOD_RES (1)..(1): (Des-amino)His
  MISC_FEATURE (12)..(16): Lactam ring between side chains at positions 12 and 16
  MOD_RES (29)..(29): C-terminal amidation
XSEGTFTSDYSKYLDEQAAKEFIAWLMNT

SEQ ID NO: 168 - protein, 29 aa, Artificial Sequence
  glucagon analog
  MOD_RES (1)..(1): (Des-amino)His
  MISC_FEATURE (16)..(20): Lactam ring between side chains at positions 16 and 20
  MOD_RES (29)..(29): C-terminal amidation
XSEGTFTSDYSKYLDEQAAKEFIAWLMNT

SEQ ID NO: 169 - protein, 29 aa, Artificial Sequence
  glucagon analog
  MOD_RES (1)..(1): (Des-amino)His
  MOD_RES (29)..(29): C-terminal amidation
XSEGTFTSDYSKYLDEQAAKEFIAWLVKG

SEQ ID NO: 170 - protein, 29 aa, Artificial Sequence
  glucagon analog
  MOD_RES (1)..(1): (Des-amino)His
  MISC_FEATURE (12)..(16): Lactam ring between side chains at positions 12 and 16
  MOD_RES (29)..(29): C-terminal amidation
XSEGTFTSDYSKYLDEQAAKEFIAWLVKG

SEQ ID NO: 171 - protein, 29 aa, Artificial Sequence
  glucagon analog
  MOD_RES (1)..(1): (Des-amino)His
  MISC_FEATURE (16)..(20): Lactam ring between side chains at positions 16 and 20
  MOD_RES (29)..(29): C-terminal amidation
XSEGTFTSDYSKYLDEQAAKEFIAWLVKG

SEQ ID NO: 172 - protein, 29 aa, Artificial Sequence
  glucagon analog
  MOD_RES (2)..(2): Xaa is AIB
  MOD_RES (29)..(29): C-terminal amidation
HXEGTFTSDYSKYLDERRAQDFVQWLMNT

SEQ ID NO: 173 - protein, 29 aa, Artificial Sequence
  glucagon analog
  MOD_RES (2)..(2): Xaa is AIB
  MOD_RES (29)..(29): C-terminal amidation
HXEGTFTSDYSKYLDERRAKDFVQWLMNT

SEQ ID NO: 174 - protein, 29 aa, Artificial Sequence
  glucagon analog
  MOD_RES (2)..(2): Xaa is AIB
  MISC_FEATURE (16)..(20): Lactam ring between side chains at positions 16 and 20
  MOD_RES (29)..(29): C-terminal amidation
HXEGTFTSDYSKYLDERRAKDFVQWLMNT

SEQ ID NO: 175 - protein, 29 aa, Artificial Sequence
  glucagon analog
  MOD_RES (2)..(2): Xaa is AIB
  MISC_FEATURE (12)..(16): Lactam ring between side chains at positions 12 and 16
  MOD_RES (29)..(29): C-terminal amidation
HXEGTFTSDYSKYLDERRAQDFVQWLMNT

SEQ ID NO: 176 - protein, 29 aa, Artificial Sequence
  glucagon analog
  MOD_RES (2)..(2): Xaa is AIB
  MISC_FEATURE (12)..(16): Lactam ring between side chains at positions 12 and 16
  MOD_RES (29)..(29): C-terminal amidation
HXEGTFTSDYSKYLDERRAKDFVQWLMNT

SEQ ID NO: 177 - protein, 29 aa, Artificial Sequence
  glucagon analog
  MOD_RES (2)..(2): Xaa is AIB
  MISC_FEATURE (16)..(20): Lactam ring between side chains at positions 16 and 20
  MOD_RES (29)..(29): C-terminal amidation
HXEGTFTSDYSKYLDKRRAEDFVQWLMNT

SEQ ID NO: 178 - protein, 29 aa, Artificial Sequence
  glucagon analog
  MOD_RES (2)..(2): Xaa is AIB
  MOD_RES (29)..(29): C-terminal amidation
HXEGTFTSDYSKYLDERAAKDFVQWLMNT

SEQ ID NO: 179 - protein, 29 aa, Artificial Sequence
  glucagon analog
  MOD_RES (2)..(2): Xaa is AIB
  MISC_FEATURE (16)..(20): Lactam ring between side chains at positions 16 and 20
  MOD_RES (29)..(29): C-terminal amidation
HXEGTFTSDYSKYLDERAAKDFVQWLMNT

SEQ ID NO: 180 - protein, 29 aa, Artificial Sequence
  glucagon analog
  MOD_RES (2)..(2): Xaa is AIB
  MISC_FEATURE (12)..(16): Lactam ring between side chains at positions 12 and 16
  MOD_RES (29)..(29): C-terminal amidation
HXEGTFTSDYSKYLDERAAQDFVQWLMNT

SEQ ID NO: 181 - protein, 29 aa, Artificial Sequence
  glucagon analog
  MOD_RES (2)..(2): Xaa is AIB
  MISC_FEATURE (12)..(16): Lactam ring between side chains at positions 12 and 16
  MOD_RES (29)..(29): C-terminal amidation
HXEGTFTSDYSKYLDERAAKDFVQWLMNT

SEQ ID NO: 182 - protein, 29 aa, Artificial Sequence
  glucagon analog
  MOD_RES (2)..(2): Xaa is AIB
  MISC_FEATURE (16)..(20): Lactam ring between side chains at positions 16 and 20
  MOD_RES (29)..(29): C-terminal amidation
HXEGTFTSDYSKYLDKRAAEDFVQWLMNT

SEQ ID NO: 183 - protein, 29 aa, Artificial Sequence
  glucagon analog
  MOD_RES (2)..(2): Xaa is AIB
  MOD_RES (29)..(29): C-terminal amidation
HXEGTFTSDYSKYLDEQAAKEFIAWLMNT

SEQ ID NO: 184 - protein, 29 aa, Artificial Sequence
  glucagon analog
  MOD_RES (2)..(2): Xaa is AIB
  MISC_FEATURE (12)..(16): Lactam ring between side chains at positions 12 and 16
  MOD_RES (29)..(29): C-terminal amidation
HXEGTFTSDYSKYLDEQAAKEFIAWLMNT

SEQ ID NO: 185 - protein, 29 aa, Artificial Sequence
  glucagon analog
  MOD_RES (2)..(2): Xaa is AIB
  MISC_FEATURE (16)..(20): Lactam ring between side chains at positions 16 and 20
  MOD_RES (29)..(29): C-terminal amidation
HXEGTFTSDYSKYLDEQAAKEFIAWLMNT

SEQ ID NO: 186 - protein, 29 aa, Artificial Sequence
  glucagon analog
  MOD_RES (2)..(2): Xaa is AIB
  MOD_RES (29)..(29): C-terminal amidation
HXEGTFTSDYSKYLDEQAAKEFIAWLVKG

SEQ ID NO: 187 - protein, 29 aa, Artificial Sequence
  glucagon analog
  MOD_RES (2)..(2): Xaa is AIB
  MISC_FEATURE (12)..(16): Lactam ring between side chains at positions 12 and 16
  MOD_RES (29)..(29): C-terminal amidation
HXEGTFTSDYSKYLDEQAAKEFIAWLVKG

SEQ ID NO: 188 - protein, 29 aa, Artificial Sequence
  glucagon analog
  MOD_RES (2)..(2): Xaa is AIB
  MISC_FEATURE (16)..(20): Lactam ring between side chains at positions 16 and 20
  MOD_RES (29)..(29): C-terminal amidation
HXEGTFTSDYSKYLDEQAAKEFIAWLVKG

SEQ ID NO: 189 - protein, 29 aa, Artificial Sequence
  glucagon analog
  MOD_RES (2)..(2): Xaa is D-Ala
  MOD_RES (29)..(29): C-terminal amidation
HXEGTFTSDYSKYLDERRAQDFVQWLMNT

SEQ ID NO: 190 - protein, 29 aa, Artificial Sequence
  glucagon analog
  MOD_RES (2)..(2): Xaa is D-Ala
  MOD_RES (29)..(29): C-terminal amidation
HXEGTFTSDYSKYLDERRAKDFVQWLMNT

SEQ ID NO: 191 - protein, 29 aa, Artificial Sequence
  glucagon analog
  MOD_RES (2)..(2): Xaa is D-Ala
  MISC_FEATURE (16)..(20): Lactam ring between side chains at positions 16 and 20
  MOD_RES (29)..(29): C-terminal amidation
HXEGTFTSDYSKYLDERRAKDFVQWLMNT

SEQ ID NO: 192 - protein, 29 aa, Artificial Sequence
  glucagon analog
  MOD_RES (2)..(2): Xaa is D-Ala
  MISC_FEATURE (12)..(16): Lactam ring between side chains at positions 12 and 16
  MOD_RES (29)..(29): C-terminal amidation
HXEGTFTSDYSKYLDERRAQDFVQWLMNT

SEQ ID NO: 193 - protein, 29 aa, Artificial Sequence
  glucagon analog
  MOD_RES (2)..(2): Xaa is D-Ala
  MISC_FEATURE (12)..(16): Lactam ring between side chains at positions 12 and 16
  MOD_RES (29)..(29): C-terminal amidation
HXEGTFTSDYSKYLDERRAKDFVQWLMNT

SEQ ID NO: 194 - protein, 29 aa, Artificial Sequence
  glucagon analog
  MOD_RES (2)..(2): Xaa is D-Ala
  MISC_FEATURE (16)..(20): Lactam ring between side chains at positions 16 and 20
  MOD_RES (29)..(29): C-terminal amidation
HXEGTFTSDYSKYLDKRRAEDFVQWLMNT

SEQ ID NO: 195 - protein, 29 aa, Artificial Sequence
  glucagon analog
  MOD_RES (2)..(2): Xaa is D-Ala
  MISC_FEATURE (16)..(20): Lactam ring between side chains at positions 16 and 20
  MOD_RES (29)..(29): C-terminal amidation
HXEGTFTSDYSKYLDERAAKDFVQWLMNT

SEQ ID NO: 196 - protein, 29 aa, Artificial Sequence
  glucagon analog
  MOD_RES (2)..(2): Xaa is D-Ala
  MISC_FEATURE (16)..(20): Lactam ring between side chains at positions 16 and 20
  MOD_RES (29)..(29): C-terminal amidation
HXEGTFTSDYSKYLDERAAKDFVQWLMNT

SEQ ID NO: 197 - protein, 29 aa, Artificial Sequence
  glucagon analog
  MOD_RES (2)..(2): Xaa is D-Ala
  MISC_FEATURE (12)..(16): Lactam ring between side chains at positions 12 and 16
  MOD_RES (29)..(29): C-terminal amidation
HXEGTFTSDYSKYLDERAAQDFVQWLMNT

SEQ ID NO: 198 - protein, 29 aa, Artificial Sequence
  glucagon analog
  MOD_RES (2)..(2): Xaa is D-Ala
  MISC_FEATURE (12)..(16): Lactam ring between side chains at positions 12 and 16
  MOD_RES (29)..(29): C-terminal amidation
HXEGTFTSDYSKYLDERAAKDFVQWLMNT

SEQ ID NO: 199 - protein, 29 aa, Artificial Sequence
  glucagon analog
  MOD_RES (2)..(2): Xaa is D-Ala
  MISC_FEATURE (16)..(20): Lactam ring between side chains at positions 16 and 20
  MOD_RES (29)..(29): C-terminal amidation
HXEGTFTSDYSKYLDKRAAEDFVQWLMNT

SEQ ID NO: 200 - protein, 29 aa, Artificial Sequence
  glucagon analog
  MOD_RES (2)..(2): Xaa is D-Ala
  MOD_RES (29)..(29): C-terminal amidation
HXEGTFTSDYSKYLDEQAAKEFIAWLMNT

SEQ ID NO: 201 - protein, 29 aa, Artificial Sequence
  glucagon analog
  MOD_RES (2)..(2): Xaa is D-Ala
  MISC_FEATURE (12)..(16): Lactam ring between side chains at positions 12 and 16
  MOD_RES (29)..(29): C-terminal amidation
HXEGTFTSDYSKYLDEQAAKEFIAWLMNT

SEQ ID NO: 202 - protein, 29 aa, Artificial Sequence
  glucagon analog
  MOD_RES (2)..(2): Xaa is D-Ala
  MISC_FEATURE (16)..(20): Lactam ring between side chains at positions 16 and 20
  MOD_RES (29)..(29): C-terminal amidation
HXEGTFTSDYSKYLDEQAAKEFIAWLMNT

SEQ ID NO: 203 - protein, 29 aa, Artificial Sequence
  glucagon analog
  MOD_RES (2)..(2): Xaa is D-Ala
  MOD_RES (29)..(29): C-terminal amidation
HXEGTFTSDYSKYLDEQAAKEFIAWLVKG

SEQ ID NO: 204 - protein, 29 aa, Artificial Sequence
  glucagon analog
  MOD_RES (2)..(2): Xaa is D-Ala
  MISC_FEATURE (12)..(16): Lactam ring between side chains at positions 12 and 16
  MOD_RES (29)..(29): C-terminal amidation
HXEGTFTSDYSKYLDEQAAKEFIAWLVKG

SEQ ID NO: 205 - protein, 29 aa, Artificial Sequence
  glucagon analog
  MOD_RES (2)..(2): Xaa is D-Ala
  MISC_FEATURE (16)..(20): Lactam ring between side chains at positions 16 and 20
  MOD_RES (29)..(29): Lactam ring between side chains at positions 16 and 20
HXEGTFTSDYSKYLDEQAAKEFIAWLVKG

SEQ ID NO: 206 - protein, 29 aa, Artificial Sequence
  glucagon analog
  MOD_RES (24)..(24): PEGYLATION
  MOD_RES (29)..(29): C-terminal amidation
HSQGTFTSDYSKYLDERRAQDFVCWLMNT

SEQ ID NO: 207 - protein, 29 aa, Artificial Sequence
  glucagon analog
  MOD_RES (24)..(24): PEGYLATION
  MOD_RES (29)..(29): C-terminal amidation
HSQGTFTSDYSKYLDERRAKDFVCWLMNT

SEQ ID NO: 208 - protein, 29 aa, Artificial Sequence
  glucagon analog
  MISC_FEATURE (16)..(20): Lactam ring between side chains at positions 16 and 20
  MOD_RES (24)..(24): PEGYLATION
  MOD_RES (29)..(29): C-terminal amidation
HSQGTFTSDYSKYLDERRAKDFVCWLMNT

SEQ ID NO: 209 - protein, 29 aa, Artificial Sequence
  glucagon analog
  MISC_FEATURE (12)..(16): Lactam ring between side chains at positions 12 and 16
  MOD_RES (24)..(24): PEGYLATION
  MOD_RES (29)..(29): C-terminal amidation
HSQGTFTSDYSKYLDERRAQDFVCWLMNT

SEQ ID NO: 210 - protein, 29 aa, Artificial Sequence
  glucagon analog
  MISC_FEATURE (12)..(16): Lactam ring between side chains at positions 12 and 16
  MOD_RES (24)..(24): PEGYLATION
  MOD_RES (29)..(29): C-terminal amidation
HSQGTFTSDYSKYLDERRAKDFVCWLMNT

SEQ ID NO: 211 - protein, 29 aa, Artificial Sequence
  glucagon analog
  MISC_FEATURE (16)..(20): Lactam ring between side chains at positions 16 and 20
  MOD_RES (24)..(24): PEGYLATION
  MOD_RES (29)..(29): C-terminal amidation
HSQGTFTSDYSKYLDKRRAEDFVCWLMNT

SEQ ID NO: 212 - protein, 29 aa, Artificial Sequence
  glucagon analog
  MISC_FEATURE (16)..(20): Lactam ring between side chains at positions 16 and 20
  MOD_RES (24)..(24): PEGYLATION
  MOD_RES (29)..(29): C-terminal amidation
HSQGTFTSDYSKYLDERAAKDFVCWLMNT

SEQ ID NO: 213 - protein, 29 aa, Artificial Sequence
  glucagon analog
  MISC_FEATURE (16)..(20): Lactam ring between side chains at positions 16 and 20
  MOD_RES (24)..(24): PEGYLATION
  MOD_RES (29)..(29): C-terminal amidation
HSQGTFTSDYSKYLDERAAKDFVCWLMNT

SEQ ID NO: 214 - protein, 29 aa, Artificial Sequence
  glucagon analog
  MISC_FEATURE (12)..(16): Lactam ring between side chains at positions 12 and 16
  MOD_RES (24)..(24): PEGYLATION
  MOD_RES (29)..(29): C-terminal amidation
HSQGTFTSDYSKYLDERAAQDFVCWLMNT

SEQ ID NO: 215 - protein, 29 aa, Artificial Sequence
  glucagon analog
  MISC_FEATURE (12)..(16): Lactam ring between side chains at positions 12 and 16
  MOD_RES (24)..(24): PEGYLATION
  MOD_RES (29)..(29): C-terminal amidation
HSQGTFTSDYSKYLDERAAKDFVCWLMNT

SEQ ID NO: 216 - protein, 29 aa, Artificial Sequence
  glucagon analog
  MISC_FEATURE (16)..(20): Lactam ring between side chains at positions 16 and 20
  MOD_RES (24)..(24): PEGYLATION
  MOD_RES (29)..(29): C-terminal amidation
HSQGTFTSDYSKYLDKRAAEDFVCWLMNT

SEQ ID NO: 217 - protein, 29 aa, Artificial Sequence
  glucagon analog
  MOD_RES (24)..(24): PEGYLATION
  MOD_RES (29)..(29): C-terminal amidation
HSQGTFTSDYSKYLDEQAAKEFICWLMNT

SEQ ID NO: 218 - protein, 29 aa, Artificial Sequence
  glucagon analog
  MISC_FEATURE (12)..(16): Lactam ring between side chains at positions 12 and 16
  MOD_RES (24)..(24): PEGYLATION
  MOD_RES (29)..(29): C-terminal amidation
HSQGTFTSDYSKYLDEQAAKEFICWLMNT

SEQ ID NO: 219 - protein, 29 aa, Artificial Sequence
  glucagon analog
  MISC_FEATURE (16)..(20): Lactam ring between side chains at positions 16 and 20
  MOD_RES (24)..(24): PEGYLATION
  MOD_RES (29)..(29): C-terminal amidation
HSQGTFTSDYSKYLDEQAAKEFICWLMNT

SEQ ID NO: 220 - protein, 29 aa, Artificial Sequence
  glucagon analog
  MOD_RES (24)..(24): PEGYLATION
  MOD_RES (29)..(29): C-terminal amidation
HSQGTFTSDYSKYLDEQAAKEFICWLVKG

SEQ ID NO: 221 - protein, 29 aa, Artificial Sequence
  glucagon analog
  MISC_FEATURE (12)..(16): Lactam ring between side chains at positions 12 and 16
  MOD_RES (24)..(24): PEGYLATION
  MOD_RES (29)..(29): C-terminal amidation
HSQGTFTSDYSKYLDEQAAKEFICWLVKG

SEQ ID NO: 222 - protein, 29 aa, Artificial Sequence
  glucagon analog
  MISC_FEATURE (16)..(20): Lactam ring between side chains at positions 16 and 20
  MOD_RES (24)..(24): PEGYLATION
  MOD_RES (29)..(29): C-terminal amidation
HSQGTFTSDYSKYLDEQAAKEFICWLVKG

SEQ ID NO: 223 - protein, 29 aa, Artificial Sequence
  glucagon analog
  MOD_RES (1)..(1): Xaa is (Des-amino)His
  MOD_RES (24)..(24): PEGYLATION
  MOD_RES (29)..(29): C-terminal amidation
XSQGTFTSDYSKYLDERRAQDFVCWLMNT

SEQ ID NO: 224 - protein, 29 aa, Artificial Sequence
  glucagon analog
  MOD_RES (1)..(1): Xaa is (Des-amino)His
  MOD_RES (24)..(24): PEGYLATION
  MOD_RES (29)..(29): C-terminal amidation
XSQGTFTSDYSKYLDERRAKDFVCWLMNT

SEQ ID NO: 225 - protein, 29 aa, Artificial Sequence
  glucagon analog
  MOD_RES (1)..(1): Xaa is (Des-amino)His
  MISC_FEATURE (16)..(20): Lactam ring between side chains at positions 16 and 20
  MOD_RES (24)..(24): PEGYLATION
  MOD_RES (29)..(29): C-terminal amidation
XSQGTFTSDYSKYLDERRAKDFVCWLMNT

SEQ ID NO: 226 - protein, 29 aa, Artificial Sequence
  glucagon analog
  MOD_RES (1)..(1): Xaa is (Des-amino)His
  MISC_FEATURE (12)..(16): Lactam ring between side chains at positions 12 and 16
  MOD_RES (24)..(24): PEGYLATION
  MOD_RES (29)..(29): C-terminal amidation
XSQGTFTSDYSKYLDERRAQDFVCWLMNT

SEQ ID NO: 227 - protein, 29 aa, Artificial Sequence
  glucagon analog
  MOD_RES (1)..(1): Xaa is (Des-amino)His
  MISC_FEATURE (12)..(16): Lactam ring between side chains at positions 12 and 16
  MOD_RES (24)..(24): PEGYLATION
  MOD_RES (29)..(29): C-terminal amidation
XSQGTFTSDYSKYLDERRAKDFVCWLMNT

SEQ ID NO: 228 - protein, 29 aa, Artificial Sequence
  glucagon analog
  MOD_RES (1)..(1): Xaa is (Des-amino)His
  MISC_FEATURE (16)..(20): Lactam ring between side chains at positions 16 and 20
  MOD_RES (24)..(24): PEGYLATION
  MOD_RES (29)..(29): C-terminal amidation
XSQGTFTSDYSKYLDKRRAEDFVCWLMNT

SEQ ID NO: 229 - protein, 29 aa, Artificial Sequence
  glucagon analog
  MOD_RES (1)..(1): Xaa is (Des-amino)His
  MOD_RES (24)..(24): PEGYLATION
  MOD_RES (29)..(29): C-terminal amidation
XSQGTFTSDYSKYLDERAAKDFVCWLMNT

SEQ ID NO: 230 - protein, 29 aa, Artificial Sequence
  glucagon analog
  MOD_RES (1)..(1): Xaa is (Des-amino)His
  MISC_FEATURE (16)..(20): Lactam ring between side chains at positions 16 and 20
  MOD_RES (24)..(24): PEGYLATION
  MOD_RES (29)..(29): C-terminal amidation
XSQGTFTSDYSKYLDERAAKDFVCWLMNT

SEQ ID NO: 231 - protein, 29 aa, Artificial Sequence
  glucagon analog
  MOD_RES (1)..(1): Xaa is (Des-amino)His
  MISC_FEATURE (12)..(16): Lactam ring between side chains at positions 12 and 16
  MOD_RES (24)..(24): PEGYLATION
  MOD_RES (29)..(29): C-terminal amidation
XSQGTFTSDYSKYLDERAAQDFVCWLMNT

SEQ ID NO: 232 - protein, 29 aa, Artificial Sequence
  glucagon analog
  MOD_RES (1)..(1): Xaa is (Des-amino)His
  MISC_FEATURE (12)..(16): Lactam ring between side chains at positions 12 and 16
  MOD_RES (24)..(24): PEGYLATION
  MOD_RES (29)..(29): C-terminal amidation
XSQGTFTSDYSKYLDERAAKDFVCWLMNT

SEQ ID NO: 233 - protein, 29 aa, Artificial Sequence
  glucagon analog
  MOD_RES (1)..(1): Xaa is (Des-amino)His
  MISC_FEATURE (16)..(20): Lactam ring between side chains at positions 16 and 20
  MOD_RES (24)..(24): PEGYLATION
  MOD_RES (29)..(29): C-terminal amidation
XSQGTFTSDYSKYLDKRAAEDFVCWLMNT

SEQ ID NO: 234 - protein, 29 aa, Artificial Sequence
  glucagon analog
  MOD_RES (1)..(1): Xaa is (Des-amino)His
  MOD_RES (24)..(24): PEGYLATION
  MOD_RES (29)..(29): C-terminal amidation
XSQGTFTSDYSKYLDEQAAKEFICWLMNT

SEQ ID NO: 235 - protein, 29 aa, Artificial Sequence
  glucagon analog
  MOD_RES (1)..(1): XAa is (Des-amino)His
  MISC_FEATURE (12)..(16): Lactam ring between side chains at positions 12 and 16
  MOD_RES (24)..(24): PEGYLATION
  MOD_RES (29)..(29): C-terminal amidation
XSQGTFTSDYSKYLDEQAAKEFICWLMNT

SEQ ID NO: 236 - protein, 29 aa, Artificial Sequence
  glucagon analog
  MOD_RES (1)..(1): Xaa is (Des-amino)His
  MISC_FEATURE (16)..(20): Lactam ring between side chains at positions 16 and 20
  MOD_RES (24)..(24): PEGYLATION
  MOD_RES (29)..(29): C-terminal amidation
XSQGTFTSDYSKYLDEQAAKEFICWLMNT

SEQ ID NO: 237 - protein, 29 aa, Artificial Sequence
  glucagon analog
  MOD_RES (1)..(1): Xaa is (Des-amino)His
  MOD_RES (24)..(24): PEGYLATION
  MOD_RES (29)..(29): C-terminal amidation
XSQGTFTSDYSKYLDEQAAKEFICWLVKG

SEQ ID NO: 238 - protein, 29 aa, Artificial Sequence
  glucagon analog
  MOD_RES (1)..(1): Xaa is (Des-amino)His
  MISC_FEATURE (12)..(16): Lactam ring between side chains at positions 12 and 16
  MOD_RES (24)..(24): PEGYLATION
  MOD_RES (29)..(29): C-terminal amidation
XSQGTFTSDYSKYLDEQAAKEFICWLVKG

SEQ ID NO: 239 - protein, 29 aa, Artificial Sequence
  glucagon analog
  MOD_RES (1)..(1): Xaa is (Des-amino)His
  MISC_FEATURE (16)..(20): Lactam ring between side chains at positions 16 and 20
  MOD_RES (24)..(24): PEGYLATION
  MOD_RES (29)..(29): C-terminal amidation
XSQGTFTSDYSKYLDEQAAKEFICWLVKG

SEQ ID NO: 240 - protein, 29 aa, Artificial Sequence
  Synthetic peptide
  MOD_RES (2)..(2): Xaa is AIB
  MOD_RES (24)..(24): PEGYLATION
  MOD_RES (29)..(29): C-terminal amidation
HXQGTFTSDYSKYLDERRAQDFVCWLMNT

SEQ ID NO: 241 - protein, 29 aa, Artificial Sequence
  Synthetic peptide
  MOD_RES (2)..(2): Xaa is AIB
  MOD_RES (24)..(24): PEGYLATION
  MOD_RES (29)..(29): C-terminal amidation
HXQGTFTSDYSKYLDERRAKDFVCWLMNT

SEQ ID NO: 242 - protein, 29 aa, Artificial Sequence
  Synthetic peptide
  MOD_RES (2)..(2): Xaa is AIB
  MISC_FEATURE (16)..(20): Lactam ring between side chains at positions 16 and 20
  MOD_RES (24)..(24): PEGYLATION
  MOD_RES (29)..(29): C-terminal amidation
HXQGTFTSDYSKYLDERRAKDFVCWLMNT

SEQ ID NO: 243 - protein, 29 aa, Artificial Sequence
  Synthetic peptide
  MOD_RES (2)..(2): Xaa is AIB
  MISC_FEATURE (12)..(16): Lactam ring between side chains at positions 12 and 16
  MOD_RES (24)..(24): PEGYLATION
  MOD_RES (29)..(29): C-terminal amidation
HXQGTFTSDYSKYLDERRAQDFVCWLMNT

SEQ ID NO: 244 - protein, 29 aa, Artificial Sequence
  Synthetic peptide
  MOD_RES (2)..(2): Xaa is AIB
  MISC_FEATURE (12)..(16): Lactam ring between side chains at positions 12 and 16
  MOD_RES (24)..(24): PEGYLATION
  MOD_RES (29)..(29): C-terminal amidation
HXQGTFTSDYSKYLDERRAKDFVCWLMNT

SEQ ID NO: 245 - protein, 29 aa, Artificial Sequence
  Synthetic peptide
  MOD_RES (2)..(2): Xaa is AIB
  MISC_FEATURE (16)..(20): Lactam ring side chains at positions 16 and 20
  MOD_RES (24)..(24): PEGYLATION
  MOD_RES (29)..(29): C-terminal amidation
HXQGTFTSDYSKYLDKRRAEDFVCWLMNT

SEQ ID NO: 246 - protein, 29 aa, Artificial Sequence
  Synthetic peptide
  MOD_RES (2)..(2): Xaa is AIB
  MOD_RES (24)..(24): PEGYLATION
  MOD_RES (29)..(29): C-terminal amidation
HXQGTFTSDYSKYLDERAAKDFVCWLMNT

SEQ ID NO: 247 - protein, 29 aa, Artificial Sequence
  Synthetic peptide
  MOD_RES (2)..(2): Xaa is AIB
  MISC_FEATURE (16)..(20): Lactam ring between side chains at positions 16 and 20
  MOD_RES (24)..(24): PEGYLATION
  MOD_RES (29)..(29): C-terminal amidation
HXQGTFTSDYSKYLDERAAKDFVCWLMNT

SEQ ID NO: 248 - protein, 29 aa, Artificial Sequence
  Synthetic peptide
  MOD_RES (2)..(2): Xaa is AIB
  MISC_FEATURE (12)..(16): Lactam ring between side chains at positions 12 and 16
  MOD_RES (24)..(24): PEGYLATION
  MOD_RES (29)..(29): C-terminal amidation
HXQGTFTSDYSKYLDERAAQDFVCWLMNT

SEQ ID NO: 249 - protein, 29 aa, Artificial Sequence
  Synthetic peptide
  MOD_RES (2)..(2): Xaa is AIB
  MISC_FEATURE (12)..(16): Lactam ring between side chains at positions 12 and 16
  MOD_RES (24)..(24): PEGYLATION
  MOD_RES (29)..(29): C-terminal amidation
HXQGTFTSDYSKYLDERAAKDFVCWLMNT

SEQ ID NO: 250 - protein, 29 aa, Artificial Sequence
  Synthetic peptide
  MOD_RES (2)..(2): Xaa is AIB
  MISC_FEATURE (12)..(16): Lactam ring between side chains at positions 12 and 16
  MOD_RES (24)..(24): PEGYLATION
  MOD_RES (29)..(29): C-terminal amidation
HXQGTFTSDYSKYLDKRAAEDFVCWLMNT

SEQ ID NO: 251 - protein, 29 aa, Artificial Sequence
  Synthetic peptide
  MOD_RES (2)..(2): Xaa is AIB
  MOD_RES (24)..(24): PEGYLATION
  MOD_RES (29)..(29): C-terminal amidation
HXQGTFTSDYSKYLDEQAAKEFICWLMNT

SEQ ID NO: 252 - protein, 29 aa, Artificial Sequence
  Synthetic peptide
  misc_feature (2)..(2): Xaa can be any naturally occurring amino acid
HXQGTFTSDYSKYLDEQAAKEFICWLMNT

SEQ ID NO: 253 - protein, 29 aa, Artificial Sequence
  Synthetic peptide
  MOD_RES (2)..(2): Xaa is AIB
  MISC_FEATURE (16)..(20): Lactam ring between side chains at positions 16 and 20
  MOD_RES (24)..(24): PEGYLATION
  MOD_RES (29)..(29): C-terminal amidation
HXQGTFTSDYSKYLDEQAAKEFICWLMNT

SEQ ID NO: 254 - protein, 29 aa, Artificial Sequence
  Synthetic peptide
  MOD_RES (2)..(2): Xaa is AIB
  MOD_RES (24)..(24): PEGYLATION
  MOD_RES (29)..(29): C-terminal amidation
HXQGTFTSDYSKYLDEQAAKEFICWLVKG

SEQ ID NO: 255 - protein, 29 aa, Artificial Sequence
  Synthetic peptide
  MOD_RES (2)..(2): Xaa is AIB
  MISC_FEATURE (12)..(16): Lactam ring between side chains at positions 12 and 16
  MOD_RES (24)..(24): PEGYLATION
  MOD_RES (29)..(29): C-terminal amidation
HXQGTFTSDYSKYLDEQAAKEFICWLVKG

SEQ ID NO: 256 - protein, 29 aa, Artificial Sequence
  Synthetic peptide
  MOD_RES (2)..(2): Xaa is AIB
  MISC_FEATURE (16)..(20): Lactam ring between side chains at positions 16 and 20
  MOD_RES (24)..(24): PEGYLATION
  MOD_RES (29)..(29): C-terminal amidation
HXQGTFTSDYSKYLDEQAAKEFICWLVKG

SEQ ID NO: 257 - protein, 29 aa, Artificial Sequence
  Synthetic peptide
  MOD_RES (2)..(2): Xaa is D-Ala
  MOD_RES (24)..(24): PEGYLATION
  MOD_RES (29)..(29): C-terminal amidation
HXQGTFTSDYSKYLDERRAQDFVCWLMNT

SEQ ID NO: 258 - protein, 29 aa, Artificial Sequence
  Synthetic peptide
  MOD_RES (2)..(2): Xaa is D-Ala
  MOD_RES (24)..(24): PEGYLATION
  MOD_RES (29)..(29): C-terminal amidation
HXQGTFTSDYSKYLDERRAKDFVCWLMNT

SEQ ID NO: 259 - protein, 29 aa, Artificial Sequence
  Synthetic peptide
  MOD_RES (2)..(2): Xaa is D-Ala
  MISC_FEATURE (16)..(20): Lactam ring between side chains at positions 16 and 20
  MOD_RES (24)..(24): PEGYLATION
  MOD_RES (29)..(29): C-terminal amidation
HXQGTFTSDYSKYLDERRAKDFVCWLMNT

SEQ ID NO: 260 - protein, 29 aa, Artificial Sequence
  Synthetic peptide
  MOD_RES (2)..(2): Xaa is D-Ala
  MISC_FEATURE (12)..(16): Lactam ring between side chrains at positions 12 and 16
  MOD_RES (24)..(24): PEGYLATION
  MOD_RES (29)..(29): C-terminal amidation
HXQGTFTSDYSKYLDERRAQDFVCWLMNT

SEQ ID NO: 261 - protein, 29 aa, Artificial Sequence
  Synthetic peptide
  MOD_RES (2)..(2): Xaa is D-Ala
  MISC_FEATURE (12)..(16): Lactam ring between side chains at positions 12 and 16
  MOD_RES (24)..(24): PEGYLATION
  MOD_RES (29)..(29): C-terminal amidation
HXQGTFTSDYSKYLDERRAKDFVCWLMNT

SEQ ID NO: 262 - protein, 29 aa, Artificial Sequence
  Synthetic peptide
  MOD_RES (2)..(2): Xaa is D-Ala
  MISC_FEATURE (16)..(20): Lactam ring between side chains at positions 16 and 20
  MOD_RES (24)..(24): PEGYLATION
  MOD_RES (29)..(29): C-terminal amidation
HXQGTFTSDYSKYLDKRRAEDFVCWLMNT

SEQ ID NO: 263 - protein, 29 aa, Artificial Sequence
  Synthetic peptide
  MOD_RES (2)..(2): Xaa is D-Ala
  MOD_RES (24)..(24): PEGYLATION
  MOD_RES (29)..(29): C-terminal amidation
HXQGTFTSDYSKYLDERAAKDFVCWLMNT

SEQ ID NO: 264 - protein, 29 aa, Artificial Sequence
  Synthetic peptide
  MOD_RES (2)..(2): Xaa is D-Ala
  MISC_FEATURE (16)..(20): Lactam ring between side chains at positions 16 and 20
  MOD_RES (24)..(24): PEGYLATION
  MOD_RES (29)..(29): C-terminal amidation
HXQGTFTSDYSKYLDERAAKDFVCWLMNT

SEQ ID NO: 265 - protein, 29 aa, Artificial Sequence
  Synthetic peptide
  MOD_RES (2)..(2): Xaa is D-Ala
  MISC_FEATURE (12)..(16): Lactam ring between side chains at positions 12 and 16
  MOD_RES (24)..(24): PEGYLATION
  MOD_RES (29)..(29): C-terminal amidation
HXQGTFTSDYSKYLDERAAQDFVCWLMNT

SEQ ID NO: 266 - protein, 29 aa, Artificial Sequence
  Synthetic peptide
  MOD_RES (2)..(2): Xaa is D-Ala
  MISC_FEATURE (12)..(16): Lactam ring betwee side chains at positions 12 and 16
  MOD_RES (24)..(24): PEGYLATION
  MOD_RES (29)..(29): C-terminal amidation
HXQGTFTSDYSKYLDERAAKDFVCWLMNT

SEQ ID NO: 267 - protein, 29 aa, Artificial Sequence
  Synthetic peptide
  MOD_RES (2)..(2): Xaa is D-Ala
  MISC_FEATURE (16)..(20): Lactam ring between side chains at positions 16 and 20
  MOD_RES (24)..(24): PEGYLATION
  MOD_RES (29)..(29): C-terminal amidation
HXQGTFTSDYSKYLDKRAAEDFVCWLMNT

SEQ ID NO: 268 - protein, 29 aa, Artificial Sequence
  Synthetic peptide
  MOD_RES (2)..(2): Xaa is D-Ala
  MOD_RES (24)..(24): PEGYLATION
  MOD_RES (29)..(29): C-terminal amidation
HXQGTFTSDYSKYLDEQAAKEFICWLMNT

SEQ ID NO: 269 - protein, 29 aa, Artificial Sequence
  Synthetic peptide
  MOD_RES (2)..(2): Xaa is D-Ala
  MISC_FEATURE (12)..(16): Lactam ring betwee side chains at positions 12 and 16
  MOD_RES (24)..(24): PEGYLATION
  MOD_RES (29)..(29): C-terminal amidation
HXQGTFTSDYSKYLDEQAAKEFICWLMNT

SEQ ID NO: 270 - protein, 29 aa, Artificial Sequence
  Synthetic peptide
  MOD_RES (2)..(2): Xaa is D-Ala
  MISC_FEATURE (16)..(20): Lactam ring betwee side chains at positions 16 and 20
  MOD_RES (24)..(24): PEGYLATION
  MOD_RES (29)..(29): C-terminal amidation
HXQGTFTSDYSKYLDEQAAKEFICWLMNT

SEQ ID NO: 271 - protein, 29 aa, Artificial Sequence
  Synthetic peptide
  MOD_RES (2)..(2): Xaa is D-Ala
  MOD_RES (24)..(24): PEGYLATION
  MOD_RES (29)..(29): C-terminal amidation
HXQGTFTSDYSKYLDEQAAKEFICWLVKG

SEQ ID NO: 272 - protein, 29 aa, Artificial Sequence
  Synthetic peptide
  MOD_RES (2)..(2): Xaa is D-Ala
  MISC_FEATURE (12)..(16): Lactam ring between side chains at positions 12 and 16
  MOD_RES (24)..(24): PEGYLATION
  MOD_RES (29)..(29): C-terminal midation
HXQGTFTSDYSKYLDEQAAKEFICWLVKG

SEQ ID NO: 273 - protein, 29 aa, Artificial Sequence
  Synthetic peptide
  MOD_RES (2)..(2): Xaa is D-Ala
  MISC_FEATURE (16)..(20): Lactam ring between side chains at positions 16 and 20
  MOD_RES (24)..(24): PEGYLATION
  MOD_RES (29)..(29): C-terminal amidation
HXQGTFTSDYSKYLDEQAAKEFICWLVKG

SEQ ID NO: 274 - protein, 29 aa, Artificial Sequence
  Synthetic peptide
  MOD_RES (24)..(24): PEGYLATION
  MOD_RES (29)..(29): C-terminal amidation
HSEGTFTSDYSKYLDERRAQDFVCWLMNT

SEQ ID NO: 275 - protein, 29 aa, Artificial Sequence
  Synthetic peptide
  MOD_RES (24)..(24): PEGYLATION
  MOD_RES (29)..(29): C-terminal amidation
HSEGTFTSDYSKYLDERRAKDFVCWLMNT

SEQ ID NO: 276 - protein, 29 aa, Artificial Sequence
  Synthetic peptide
  MISC_FEATURE (16)..(20): Lactam ring between side chains at positions 16 and 20
  MOD_RES (24)..(24): PEGYLATION
  MOD_RES (29)..(29): C-terminal amidation
HSEGTFTSDYSKYLDERRAKDFVCWLMNT

SEQ ID NO: 277 - protein, 29 aa, Artificial Sequence
  Synthetic peptide
  MISC_FEATURE (12)..(16): Lactam ring between side chains at positions 12 and 16
  MOD_RES (24)..(24): PEGYLATION
  MOD_RES (29)..(29): C-terminal amidation
HSEGTFTSDYSKYLDERRAQDFVCWLMNT

SEQ ID NO: 278 - protein, 29 aa, Artificial Sequence
  Synthetic peptide
  MISC_FEATURE (12)..(16): Lactam ring between side chains at positions 12 and 16
  MOD_RES (24)..(24): PEGYLATION
  MOD_RES (29)..(29): C-terminal amidation
HSEGTFTSDYSKYLDERRAKDFVCWLMNT

SEQ ID NO: 279 - protein, 29 aa, Artificial Sequence
  Synthetic peptide
  MISC_FEATURE (16)..(20): Lactam ring between side chains at positions 16 and 20
  MOD_RES (24)..(24): PEGYLATION
  MOD_RES (29)..(29): C-terminal amidation
HSEGTFTSDYSKYLDKRRAEDFVCWLMNT

SEQ ID NO: 280 - protein, 29 aa, Artificial Sequence
  Synthetic peptide
  MOD_RES (24)..(24): PEGYLATION
  MOD_RES (29)..(29): C-terminal amidation
HSEGTFTSDYSKYLDERAAKDFVCWLMNT

SEQ ID NO: 281 - protein, 29 aa, Artificial Sequence
  Synthetic peptide
  MISC_FEATURE (16)..(20): Lactam ring between side chains at positions 16 and 20
  MOD_RES (24)..(24): PEGYLATION
  MOD_RES (29)..(29): C-terminal amidation
HSEGTFTSDYSKYLDERAAKDFVCWLMNT

SEQ ID NO: 282 - protein, 29 aa, Artificial Sequence
  Synthetic peptide
  MISC_FEATURE (12)..(16): Lactam ring between side chains at positions 12 and 16
  MOD_RES (24)..(24): PEGYLATION
  MOD_RES (29)..(29): C-terminal amidation
HSEGTFTSDYSKYLDERAAQDFVCWLMNT

SEQ ID NO: 283 - protein, 29 aa, Artificial Sequence
  Synthetic peptide
  MISC_FEATURE (12)..(16): Lactam ring between side chains at positions 12 and 16
  MOD_RES (24)..(24): PEGYLATION
  MOD_RES (29)..(29): C-terminal amidation
HSEGTFTSDYSKYLDERAAKDFVCWLMNT

SEQ ID NO: 284 - protein, 29 aa, Artificial Sequence
  Synthetic peptide
  MISC_FEATURE (16)..(20): Lactam ring between side chains at positions 16 and 20
  MOD_RES (24)..(24): PEGYLATION
  MOD_RES (29)..(29): C-terminal amidation
HSEGTFTSDYSKYLDKRAAEDFVCWLMNT

SEQ ID NO: 285 - protein, 29 aa, Artificial Sequence
  Synthetic peptide
  MOD_RES (24)..(24): PEGYLATION
  MOD_RES (29)..(29): C-terminal amidation
HSEGTFTSDYSKYLDEQAAKEFICWLMNT

SEQ ID NO: 286 - protein, 29 aa, Artificial Sequence
  Synthetic peptide
  MISC_FEATURE (12)..(16): Lactam ring between side chains at positions 12 and 16
  MOD_RES (24)..(24): PEGYLATION
  MOD_RES (29)..(29): C-terminal amidation
HSEGTFTSDYSKYLDEQAAKEFICWLMNT

SEQ ID NO: 287 - protein, 29 aa, Artificial Sequence
  Synthetic peptide
  MISC_FEATURE (16)..(20): Lactam ring between side chain at positions 16 and 20
  MOD_RES (24)..(24): PEGYLATION
  MOD_RES (29)..(29): C-terminal amidation
HSEGTFTSDYSKYLDEQAAKEFICWLMNT

SEQ ID NO: 288 - protein, 29 aa, Artificial Sequence
  Synthetic peptide
  MOD_RES (24)..(24): PEGYLATION
  MOD_RES (29)..(29): C-terminal amidation
HSEGTFTSDYSKYLDEQAAKEFICWLVKG

SEQ ID NO: 289 - protein, 29 aa, Artificial Sequence
  Synthetic peptide
  MISC_FEATURE (12)..(16): Lactam ring between side chains at positions 12 and 16
  MOD_RES (24)..(24): PEGYLATION
  MOD_RES (29)..(29): C-terminal amidation
HSEGTFTSDYSKYLDEQAAKEFICWLVKG

SEQ ID NO: 290 - protein, 29 aa, Artificial Sequence
  Synthetic peptide
  MISC_FEATURE (16)..(20): Lactam ring between side chains at positions 16 and 20
  MOD_RES (24)..(24): PEGYLATION
  MOD_RES (29)..(29): C-terminal amidation
HSEGTFTSDYSKYLDEQAAKEFICWLVKG

SEQ ID NO: 291 - protein, 29 aa, Artificial Sequence
  Synthetic peptide
  MOD_RES (1)..(1): Xaa is (Des-amino)His
  MOD_RES (24)..(24): PEGYLATION
  MOD_RES (29)..(29): C-terminal amidation
XSEGTFTSDYSKYLDERRAQDFVCWLMNT

SEQ ID NO: 292 - protein, 29 aa, Artificial Sequence
  Synthetic peptide
  MOD_RES (1)..(1): Xaa is (Des-amino)His
  MOD_RES (24)..(24): PEGYLATION
  MOD_RES (29)..(29): C-terminal amidation
XSEGTFTSDYSKYLDERRAKDFVCWLMNT

SEQ ID NO: 293 - protein, 29 aa, Artificial Sequence
  Synthetic peptide
  MOD_RES (1)..(1): Xaa is (Des-amino)His
  MISC_FEATURE (16)..(20): Lactam ring between side chains at positions 16 and 20
  MOD_RES (24)..(24): PEGYLATION
  MOD_RES (29)..(29): C-terminal amidation
XSEGTFTSDYSKYLDERRAKDFVCWLMNT

SEQ ID NO: 294 - protein, 29 aa, Artificial Sequence
  Synthetic peptide
  MOD_RES (1)..(1): Xaa is (Des-amino)His
  MISC_FEATURE (12)..(16): Lactam ring between side chains at positions 12 and 16
  MOD_RES (24)..(24): PEGYLATION
  MOD_RES (29)..(29): C-terminal amidation
XSEGTFTSDYSKYLDERRAQDFVCWLMNT

SEQ ID NO: 295 - protein, 29 aa, Artificial Sequence
  Synthetic peptide
  MOD_RES (1)..(1): Xaa is (Des-amino)His
  MISC_FEATURE (12)..(16): Lactam ring between side chains at positions 12 and 16
  MOD_RES (24)..(24): PEGYLATION
  MOD_RES (29)..(29): C-terminal amidation
XSEGTFTSDYSKYLDERRAKDFVCWLMNT

SEQ ID NO: 296 - protein, 29 aa, Artificial Sequence
  Synthetic peptide
  MOD_RES (1)..(1): Xaa is (Des-amino)His
  MISC_FEATURE (16)..(20): Lactam ring between side chains at positions 16 and 20
  MOD_RES (24)..(24): PEGYLATION
  MOD_RES (29)..(29): C-terminal amidation
XSEGTFTSDYSKYLDKRRAEDFVCWLMNT

SEQ ID NO: 297 - protein, 29 aa, Artificial Sequence
  Synthetic peptide
  MOD_RES (1)..(1): Xaa is (Des-amino)His
  MOD_RES (24)..(24): PEGYLATION
  MOD_RES (29)..(29): C-terminal amidation
XSEGTFTSDYSKYLDERAAKDFVCWLMNT

SEQ ID NO: 298 - protein, 29 aa, Artificial Sequence
  Synthetic peptide
  MOD_RES (1)..(1): Xaa is (Des-amino)His
  MISC_FEATURE (16)..(20): Lactam ring between side chains at positions 16 and 20
  MOD_RES (24)..(24): PEGYLATION
  MOD_RES (29)..(29): C-terminal amidation
XSEGTFTSDYSKYLDERAAKDFVCWLMNT

SEQ ID NO: 299 - protein, 29 aa, Artificial Sequence
  Synthetic peptide
  MOD_RES (1)..(1): Xaa is (Des-amino)His
  MISC_FEATURE (12)..(16): Lactam ring between side chains at positions 12 and 16
  MOD_RES (24)..(24): PEGYLATION
  MOD_RES (29)..(29): C-terminal amidation
XSEGTFTSDYSKYLDERAAQDFVCWLMNT

SEQ ID NO: 300 - protein, 29 aa, Artificial Sequence
  Synthetic peptide
  MOD_RES (1)..(1): Xaa is (Des-amino)His
  MISC_FEATURE (12)..(16): Lactam ring between side chains at positions 12 and 16
  MOD_RES (24)..(24): PEGYLATION
  MOD_RES (29)..(29): C-terminal amidation
XSEGTFTSDYSKYLDERAAKDFVCWLMNT

SEQ ID NO: 301 - protein, 29 aa, Artificial Sequence
  Synthetic peptide
  MISC_FEATURE: c-term amidation
  MOD_RES (1)..(1): (Des-amino)His
  MISC_FEATURE (16)..(20): Lactam ring between side chains at positions 16 and 20
  MOD_RES (24)..(24): Cys-PEG
XSEGTFTSDYSKYLDKRAAEDFVCWLMNT

SEQ ID NO: 302 - protein, 29 aa, Artificial Sequence
  Synthetic peptide
  MISC_FEATURE: c-term amidation
  MOD_RES (1)..(1): (Des-amino)His
  MOD_RES (24)..(24): Cys-PEG
XSEGTFTSDYSKYLDEQAAKGFICWLMNT

SEQ ID NO: 303 - protein, 29 aa, Artificial Sequence
  Synthetic peptide
  MISC_FEATURE: c-term amidation
  MOD_RES (1)..(1): (Des-amino)His
  MISC_FEATURE (12)..(16): Lactam ring between side chains at positions 12 and 16
  MOD_RES (24)..(24): Cys-PEG
XSEGTFTSDYSKYLDEQAAKGFICWLMNT

SEQ ID NO: 304 - protein, 29 aa, Artificial Sequence
  Synthetic peptide
  MISC_FEATURE: c-term amidation
  MOD_RES (1)..(1): (Des-amino)His
  MISC_FEATURE (16)..(20): Lactam ring between side chains at positions 16 and 20
  MOD_RES (24)..(24): Cys-PEG
XSEGTFTSDYSKYLDEQAAKGFICWLMNT

SEQ ID NO: 305 - protein, 29 aa, Artificial Sequence
  Synthetic peptide
  MISC_FEATURE: c-term amidation
  MOD_RES (1)..(1): (des-amino)His
  MOD_RES (24)..(24): Cys-PEG
XSEGTFTSDYSKYLDEQAAKGFICWLVKG

SEQ ID NO: 306 - protein, 29 aa, Artificial Sequence
  Synthetic peptide
  MISC_FEATURE: c-term amidation
  MOD_RES (1)..(1): (Des-amino)His
  MISC_FEATURE (12)..(16): Lactam ring between side chains at positions 12 and 16
  MOD_RES (24)..(24): Cys-PEG
XSEGTFTSDYSKYLDEQAAKGFICWLVKG

SEQ ID NO: 307 - protein, 29 aa, Artificial Sequence
  Synthetic peptide
  MISC_FEATURE: c-term amidation
  MOD_RES (1)..(1): (Des-amino)His
  MISC_FEATURE (16)..(20): Lactam ring between side chains at positions 16 and 20
  MOD_RES (24)..(24): Cys-PEG
XSEGTFTSDYSKYLDEQAAKGFICWLVKG

SEQ ID NO: 308 - protein, 29 aa, Artificial Sequence
  Synthetic peptide
  MISC_FEATURE: c-term amidation
  MOD_RES (2)..(2): Aminoisobutyric acid
  MOD_RES (24)..(24): Cys-PEG
HXEGTFTSDYSKYLDERRAQDFVCWLMNT

SEQ ID NO: 309 - protein, 29 aa, Artificial Sequence
  Synthetic peptide
  MISC_FEATURE: c-term amidation
  MOD_RES (2)..(2): Aminoisobutyric acid
  MOD_RES (24)..(24): Cys-PEG
HXEGTFTSDYSKYLDERRAKDFVCWLMNT

SEQ ID NO: 310 - protein, 29 aa, Artificial Sequence
  Synthetic peptide
  MISC_FEATURE: c-term amidation
  MOD_RES (2)..(2): Aminoisobutyric acid
  MISC_FEATURE (16)..(20): Lactam ring between side chains at positions 16 and 20
  MOD_RES (24)..(24): Cys-PEG
HXEGTFTSDYSKYLDERRAKDFVCWLMNT

SEQ ID NO: 311 - protein, 29 aa, Artificial Sequence
  Synthetic peptide
  MISC_FEATURE: c-term amidation
  MOD_RES (2)..(2): Aminoisobutyric acid
  MISC_FEATURE (12)..(16): Lactam ring between side chain at positions 12 and 16
  MOD_RES (24)..(24): Cys-PEG
HXEGTFTSDYSKYLDERRAQDFVCWLMNT

SEQ ID NO: 312 - protein, 29 aa, Artificial Sequence
  Synthetic peptide
  MISC_FEATURE: c-term amidation
  MOD_RES (2)..(2): Aminoisobutyric acid
  MISC_FEATURE (12)..(16): Lactam ring between side chains at positions 12 and 16
  MOD_RES (24)..(24): Cys-PEG
HXEGTFTSDYSKYLDERRAKDFVCWLMNT

SEQ ID NO: 313 - protein, 29 aa, Artificial Sequence
  Synthetic peptide
  MISC_FEATURE: c-term amidation
  MOD_RES (2)..(2): Aminoisobutyric acid
  MISC_FEATURE (16)..(20): Lactam ring between side chains at positions 16 and 20
  MOD_RES (24)..(24): Cys-PEG
HXEGTFTSDYSKYLDKRRAEDFVCWLMNT

SEQ ID NO: 314 - protein, 29 aa, Artificial Sequence
  Synthetic peptide
  MISC_FEATURE: c-term amidation
  MOD_RES (2)..(2): Aminoisobutyric acid
  MOD_RES (24)..(24): Cys-PEG
HXEGTFTSDYSKYLDERAAKDFVCWLMNT

SEQ ID NO: 315 - protein, 29 aa, Artificial Sequence
  Synthetic peptide
  MISC_FEATURE: c-term amidation
  MOD_RES (2)..(2): Aminoisobutyric acid
  MISC_FEATURE (16)..(20): Lactam ring between seide chains at positions 16 and 20
  MOD_RES (24)..(24): Cys-PEG
HXEGTFTSDYSKYLDERAAKDFVCWLMNT

SEQ ID NO: 316 - protein, 29 aa, Artificial Sequence
  Synthetic peptide
  MISC_FEATURE: c-term amidation
  MOD_RES (2)..(2): Aminoisobutyric acid
  MISC_FEATURE (12)..(16): Lactam ring between side chains at positions 12 and 16
  MOD_RES (24)..(24): Cys-PEG
HXEGTFTSDYSKYLDERAAQDFVCWLMNT

SEQ ID NO: 317 - protein, 29 aa, Artificial Sequence
  Synthetic peptide
  MISC_FEATURE: c-term amidation
  MOD_RES (2)..(2): Aminoisobutyric acid
  MISC_FEATURE (12)..(16): Lactam ring between side chains at positions 12 and 16
  MOD_RES (24)..(24): Cys-PEG
HXEGTFTSDYSKYLDERAAKDFVCWLMNT

SEQ ID NO: 318 - protein, 29 aa, Artificial Sequence
  Synthetic peptide
  MISC_FEATURE: c-term amidation
  MOD_RES (2)..(2): Aminoisobutyric acid
  MISC_FEATURE (16)..(20): Lactam ring between side chains at positions 16 and 20
  MOD_RES (24)..(24): Cys-PEG
HXEGTFTSDYSKYLDKRAAEDFVCWLMNT

SEQ ID NO: 319 - protein, 29 aa, Artificial Sequence
  Synthetic peptide
  MISC_FEATURE: c-term amidation
  MOD_RES (2)..(2): Aminoisobutyric acid
  MOD_RES (24)..(24): Cys-PEG
HXEGTFTSDYSKYLDEQAAKEFICWLMNT

SEQ ID NO: 320 - protein, 29 aa, Artificial Sequence
  Synthetic peptide
  MISC_FEATURE: c-term amidation
  MOD_RES (2)..(2): Aminoisobutyric acid
  MISC_FEATURE (12)..(16): Lactam ring between side chains at positions 12 and 16
  MOD_RES (24)..(24): Cys-PEG
HXEGTFTSDYSKYLDEQAAKEFICWLMNT

SEQ ID NO: 321 - protein, 29 aa, Artificial Sequence
  Synthetic peptide
  MISC_FEATURE: c-term amidation
  MOD_RES (2)..(2): Aminoisobutyric acid
  MISC_FEATURE (16)..(20): Lactam ring between side chains at position 16 and 20
  MOD_RES (24)..(24): Cys-PEG
HXEGTFTSDYSKYLDEQAAKEFICWLMNT

SEQ ID NO: 322 - protein, 29 aa, Artificial Sequence
  Synthetic peptide
  MISC_FEATURE: c-term amidation
  MOD_RES (2)..(2): Aminoisobutyric acid
  MOD_RES (24)..(24): Cys-PEG
HXEGTFTSDYSKYLDEQAAKEFICWLVKG

SEQ ID NO: 323 - protein, 29 aa, Artificial Sequence
  Synthetic peptide
  MISC_FEATURE: c-term amidation
  MOD_RES (2)..(2): Aminoisobutyric acid
  MISC_FEATURE (12)..(16): Lactam ring between side chains at positions 12 and 16
  MOD_RES (24)..(24): Cys-PEG
HXEGTFTSDYSKYLDEQAAKEFICWLVKG

SEQ ID NO: 324 - protein, 29 aa, Artificial Sequence
  Synthetic peptide
  MISC_FEATURE: c-term amidation
  MOD_RES (2)..(2): Aminoisobutyric acid
  MISC_FEATURE (16)..(20): Lactam ring between side chains at position 16 and 20
  MOD_RES (24)..(24): Cys-PEG
HXEGTFTSDYSKYLDEQAAKEFICWLVKG

SEQ ID NO: 325 - protein, 29 aa, Artificial Sequence
  Synthetic peptide
  MISC_FEATURE: c-term amidation
  MOD_RES (2)..(2): D-Ala
  MOD_RES (24)..(24): Cys-PEG
HXEGTFTSDYSKYLDERRAQDFVCWLMNT

SEQ ID NO: 326 - protein, 29 aa, Artificial Sequence
  Synthetic peptide
  MISC_FEATURE: c-term amidation
  MOD_RES (2)..(2): D-Ala
  MOD_RES (24)..(24): Cys-PEG
HXEGTFTSDYSKYLDERRAKDFVCWLMNT

SEQ ID NO: 327 - protein, 29 aa, Artificial Sequence
  Synthetic peptide
  MISC_FEATURE: c-term amidation
  MOD_RES (2)..(2): D-Ala
  MISC_FEATURE (16)..(20): Lactam ring between side chains at positions 16 and 20
  MOD_RES (24)..(24): Cys-PEG
HXEGTFTSDYSKYLDERRAKDFVCWLMNT

SEQ ID NO: 328 - protein, 29 aa, Artificial Sequence
  Synthetic peptide
  MISC_FEATURE: c-term amidation
  MOD_RES (2)..(2): D-Ala
  MISC_FEATURE (12)..(16): Lactam between side chains at positions 12 and 16
  MOD_RES (24)..(24): Cys-PEG
HXEGTFTSDYSKYLDERRAQDFVCWLMNT

SEQ ID NO: 329 - protein, 29 aa, Artificial Sequence
  Synthetic peptide
  MISC_FEATURE: c-term amidation
  MOD_RES (2)..(2): D-Ala
  MISC_FEATURE (12)..(16): Lactam ring between side chains at positions 12 and 16
  MOD_RES (24)..(24): Cys-PEG
HXEGTFTSDYSKYLDERRAKDFVCWLMNT

SEQ ID NO: 330 - protein, 29 aa, Artificial Sequence
  Synthetic peptide
  MISC_FEATURE: c-term amidation
  MOD_RES (2)..(2): D-Ala
  MISC_FEATURE (16)..(20): Lactam ring between side chains at positions 16 and 20
  MOD_RES (24)..(24): Cys-PEG
HXEGTFTSDYSKYLDKRRAEDFVCWLMNT

SEQ ID NO: 331 - protein, 29 aa, Artificial Sequence
  Synthetic peptide
  MISC_FEATURE: c-term amidation
  MOD_RES (2)..(2): D-Ala
  MOD_RES (24)..(24): Cys-PEG
HXEGTFTSDYSKYLDERAAKDFVCWLMNT

SEQ ID NO: 332 - protein, 29 aa, Artificial Sequence
  Synthetic peptide
  MISC_FEATURE: c-term amidation
  MOD_RES (2)..(2): D-Ala
  MISC_FEATURE (16)..(20): Lactam ring between side chains at positions 16 and 20
  MOD_RES (24)..(24): Cys-PEG
HXEGTFTSDYSKYLDERAAKDFVCWLMNT

SEQ ID NO: 333 - protein, 29 aa, Artificial Sequence
  Synthetic peptide
  MISC_FEATURE: c-term amidation
  MOD_RES (2)..(2): D-Ala
  MISC_FEATURE (12)..(16): Lactam ring between side chains at positions 12 and 16
  MOD_RES (24)..(24): Cys-PEG
HXEGTFTSDYSKYLDERAAQDFVCWLMNT

SEQ ID NO: 334 - protein, 29 aa, Artificial Sequence
  Synthetic peptide
  MISC_FEATURE: c-term amidation
  MOD_RES (2)..(2): D-Ala
  MISC_FEATURE (12)..(16): Lactam ring between side chains at positions 12 and 16
  MOD_RES (24)..(24): Cys-PEG
HXEGTFTSDYSKYLDERAAKDFVCWLMNT

SEQ ID NO: 335 - protein, 29 aa, Artificial Sequence
  Synthetic peptide
  MISC_FEATURE: c-term amidation
  MOD_RES (2)..(2): D-Ala
  MISC_FEATURE (12)..(16): Lactam ring between side chainst at positions 16 and 20
  MOD_RES (24)..(24): Cys-PEG
HXEGTFTSDYSKYLDKRAAEDFVCWLMNT

SEQ ID NO: 336 - protein, 29 aa, Artificial Sequence
  Synthetic peptide
  MISC_FEATURE: c-term amidation
  MOD_RES (2)..(2): D-Ala
  MOD_RES (24)..(24): Cys-PEG
HXEGTFTSDYSKYLDEQAAKEFICWLMNT

SEQ ID NO: 337 - protein, 29 aa, Artificial Sequence
  Synthetic peptide
  MISC_FEATURE: c-term amidation
  MOD_RES (2)..(2): D-Ala
  MISC_FEATURE (12)..(16): Lactam ring between side chains at positions 12 and 16
  MOD_RES (24)..(24): Cys-PEG
HXEGTFTSDYSKYLDEQAAKEFICWLMNT

SEQ ID NO: 338 - protein, 29 aa, Artificial Sequence
  Synthetic peptide
  MISC_FEATURE: c-term amidation
  MOD_RES (2)..(2): D-Ala
  MISC_FEATURE (16)..(20): Lactam right between side chains at positions 16 and 20
  MOD_RES (24)..(24): Cys-PEG
HXEGTFTSDYSKYLDEQAAKEFICWLMNT

SEQ ID NO: 339 - protein, 29 aa, Artificial Sequence
  Synthetic peptide
  MISC_FEATURE: c-term amidation
  MOD_RES (2)..(2): D-Ala
  MOD_RES (24)..(24): Cys-PEG
HXEGTFTSDYSKYLDEQAAKEFICWLVKG

SEQ ID NO: 340 - protein, 29 aa, Artificial Sequence
  Synthetic peptide
  MISC_FEATURE: c-term amidation
  MOD_RES (2)..(2): D-Ala
  MISC_FEATURE (12)..(16): Lactam ring between side chains at positions 12 and 16
  MOD_RES (24)..(24): Cys-PEG
HXEGTFTSDYSKYLDEQAAKEFICWLVKG

SEQ ID NO: 341 - protein, 29 aa, Artificial Sequence
  Synthetic peptide
  MISC_FEATURE: c-term amidation
  MOD_RES (2)..(2): D-Ala
  MISC_FEATURE (16)..(20): Lactam ring between side chains at positions 16 and 20
  MOD_RES (24)..(24): Cys-PEG
HXEGTFTSDYSKYLDEQAAKEFICWLVKG

SEQ ID NO: 342 - protein, 29 aa, Artificial Sequence
  Synthetic peptide
  MISC_FEATURE: c-term amidation
  MOD_RES (16)..(16): Cys-PEG
HSQGTFTSDYSKYLDCRRAKDFVQWLMNT

SEQ ID NO: 343 - protein, 29 aa, Artificial Sequence
  Synthetic peptide
  MISC_FEATURE: c-term amidation
  MOD_RES (16)..(16): Cys-PEG
HSQGTFTSDYSKYLDCRAAKDFVQWLMNT

SEQ ID NO: 344 - protein, 29 aa, Artificial Sequence
  Synthetic peptide
  MISC_FEATURE: c-term amidation
  MOD_RES (16)..(16): Cys-PEG
HSQGTFTSDYSKYLDCQAAKEFIAWLMNT

SEQ ID NO: 345 - protein, 29 aa, Artificial Sequence
  Synthetic peptide
  MISC_FEATURE: c-term amidation
  MOD_RES (16)..(16): Cys-PEG
HSQGTFTSDYSKYLDCQAAKEFIAWLVKG

SEQ ID NO: 346 - protein, 29 aa, Artificial Sequence
  Synthetic peptide
  MISC_FEATURE: c-term amidation
  MOD_RES (1)..(1): (Des-amino)His
  MOD_RES (16)..(16): Cys-PEG
XSQGTFTSDYSKYLDCRRAKDFVQWLMNT

SEQ ID NO: 347 - protein, 29 aa, Artificial Sequence
  Synthetic peptide
  MISC_FEATURE: c-term amidation
  MOD_RES (1)..(1): (Des-amino)His
  MOD_RES (16)..(16): Cys-PEG
XSQGTFTSDYSKYLDCRAAKDFVQWLMNT

SEQ ID NO: 348 - protein, 29 aa, Artificial Sequence
  Synthetic peptide
  MISC_FEATURE: c-term amidation
  MOD_RES (1)..(1): (Des-amino)His
  MOD_RES (16)..(16): Cys-PEG
XSQGTFTSDYSKYLDCQAAKEFIAWLMNT

SEQ ID NO: 349 - protein, 29 aa, Artificial Sequence
  Synthetic peptide
  MISC_FEATURE: c-term amidation
  MOD_RES (1)..(1): (Des-amino)His
  MOD_RES (16)..(16): Cys-PEG
XSQGTFTSDYSKYLDCQAAKEFIAWLVKG

SEQ ID NO: 350 - protein, 29 aa, Artificial Sequence
  Synthetic peptide
  MISC_FEATURE: c-term amidation
  MOD_RES (1)..(1): (Des-amino)His
  MOD_RES (16)..(16): Cys-PEG
XSQGTFTSDYSKYLDCQAAKEFIAWLMNT

SEQ ID NO: 351 - protein, 29 aa, Artificial Sequence
  Synthetic peptide
  MISC_FEATURE: c-term amidation
  MOD_RES (2)..(2): Aminoisobutyric acid
  MOD_RES (16)..(16): Cys-PEG
HXQGTFTSDYSKYLDCRAAKDFVQWLMNT

SEQ ID NO: 352 - protein, 29 aa, Artificial Sequence
  Synthetic peptide
  MISC_FEATURE: c-term amidation
  MOD_RES (2)..(2): Aminoisobutyric acid
  MOD_RES (16)..(16): Cys-PEG
HXQGTFTSDYSKYLDCQAAKEFIAWLMNT

SEQ ID NO: 353 - protein, 29 aa, Artificial Sequence
  Synthetic peptide
  MISC_FEATURE: c-term amidation
  MOD_RES (2)..(2): Aminoisobutyric acid
  MOD_RES (16)..(16): Cys-PEG
HXQGTFTSDYSKYLDCQAAKEFIAWLVKG

SEQ ID NO: 354 - protein, 29 aa, Artificial Sequence
  Synthetic peptide
  MISC_FEATURE: c-term amidation
  MOD_RES (2)..(2): D-Ala
  MOD_RES (16)..(16): Cys-PEG
HXQGTFTSDYSKYLDCRRAKDFVQWLMNT

SEQ ID NO: 355 - protein, 29 aa, Artificial Sequence
  Synthetic peptide
  MISC_FEATURE: c-term amidation
  MOD_RES (2)..(2): D-Ala
  MOD_RES (16)..(16): Cys-PEG
HXQGTFTSDYSKYLDCRAAKDFVQWLMNT

SEQ ID NO: 356 - protein, 29 aa, Artificial Sequence
  Synthetic peptide
  MISC_FEATURE: c-term amidation
  MOD_RES (2)..(2): D-Ala
  MOD_RES (16)..(16): Cys-PEG
HXQGTFTSDYSKYLDCQAAKEFIAWLMNT

SEQ ID NO: 357 - protein, 29 aa, Artificial Sequence
  Synthetic peptide
  MISC_FEATURE: c-term amidation
  MOD_RES (2)..(2): D-Ala
  MOD_RES (16)..(16): Cys-PEG
HXQGTFTSDYSKYLDCQAAKEFIAWLVKG

SEQ ID NO: 358 - protein, 29 aa, Artificial Sequence
  Synthetic peptide
  MISC_FEATURE: c-term amidation
  MOD_RES (16)..(16): Cys-PEG
HSEGTFTSDYSKYLDCRRAKDFVQWLMNT

SEQ ID NO: 359 - protein, 29 aa, Artificial Sequence
  Synthetic peptide
  MISC_FEATURE: c-term amidation
  MOD_RES (16)..(16): Cys-PEG
HSEGTFTSDYSKYLDCRAAKDFVQWLMNT

SEQ ID NO: 360 - protein, 29 aa, Artificial Sequence
  Synthetic peptide
  MISC_FEATURE: c-term amidation
  MOD_RES (16)..(16): Cys-PEG
HSEGTFTSDYSKYLDCQAAKEFIAWLMNT

SEQ ID NO: 361 - protein, 29 aa, Artificial Sequence
  Synthetic peptide
  MISC_FEATURE: c-term amidation
  MOD_RES (16)..(16): Cys-PEG
HSEGTFTSDYSKYLDCQAAKEFIAWLVKG

SEQ ID NO: 362 - protein, 29 aa, Artificial Sequence
  Synthetic peptide
  MISC_FEATURE: c-term amidation
  MOD_RES (1)..(1): (Des-amino)His
  MOD_RES (16)..(16): Cys-PEG
XSEGTFTSDYSKYLDCRRAKDFVQWLMNT

SEQ ID NO: 363 - protein, 29 aa, Artificial Sequence
  Synthetic peptide
  MISC_FEATURE: c-term amidation
  MOD_RES (1)..(1): (Des-amino)His
  MOD_RES (16)..(16): Cys-PEG
XSEGTFTSDYSKYLDCRAAKDFVQWLMNT

SEQ ID NO: 364 - protein, 29 aa, Artificial Sequence
  Synthetic peptide
  MISC_FEATURE: c-term amidation
  MOD_RES (1)..(1): (Des-amino)His
  MOD_RES (16)..(16): Cys-PEG
XSEGTFTSDYSKYLDCQAAKEFIAWLMNT

SEQ ID NO: 365 - protein, 29 aa, Artificial Sequence
  Synthetic peptide
  MISC_FEATURE: c-term amidation
  MOD_RES (1)..(1): (Des-amino)His
  MOD_RES (16)..(16): Cys-PEG
XSEGTFTSDYSKYLDCQAAKEFIAWLVKG

SEQ ID NO: 366 - protein, 29 aa, Artificial Sequence
  Synthetic peptide
  MISC_FEATURE: c-term amidation
  MOD_RES (2)..(2): D-Ala
  MOD_RES (16)..(16): Cys-PEG
HXEGTFTSDYSKYLDCRRAKDFVQWLMNT

SEQ ID NO: 367 - protein, 29 aa, Artificial Sequence
  Synthetic peptide
  MISC_FEATURE: c-term amidation
  MOD_RES (2)..(2): D-Ala
  MOD_RES (16)..(16): Cys-PEG
HXEGTFTSDYSKYLDCRAAKDFVQWLMNT

SEQ ID NO: 368 - protein, 29 aa, Artificial Sequence
  Synthetic peptide
  MISC_FEATURE: c-term amidation
  MOD_RES (2)..(2): D-Ala
  MOD_RES (16)..(16): Cys-PEG
HXEGTFTSDYSKYLDCQAAKEFIAWLMNT

SEQ ID NO: 369 - protein, 29 aa, Artificial Sequence
  Synthetic peptide
  MISC_FEATURE: c-term amidation
  MOD_RES (2)..(2): D-Ala
  MOD_RES (16)..(16): Cys-PEG
HXEGTFTSDYSKYLDCQAAKEFIAWLVKG

SEQ ID NO: 370 - protein, 29 aa, Artificial Sequence
  Synthetic peptide
  MISC_FEATURE: c-term amidation
  MOD_RES (2)..(2): D-Ala
  MOD_RES (16)..(16): Cys-PEG
HXEGTFTSDYSKYLDCRRAKDFVQWLMNT

SEQ ID NO: 371 - protein, 29 aa, Artificial Sequence
  Synthetic peptide
  MISC_FEATURE: c-term amidation
  MOD_RES (2)..(2): D-Ala
  MOD_RES (16)..(16): Cys-PEG
HXEGTFTSDYSKYLDCRAAKDFVQWLMNT

SEQ ID NO: 372 - protein, 29 aa, Artificial Sequence
  Synthetic peptide
  MISC_FEATURE: c-term amidation
  MOD_RES (2)..(2): D-Ala
  MOD_RES (16)..(16): Cys-PEG
HXEGTFTSDYSKYLDCQAAKEFIAWLMNT

SEQ ID NO: 373 - protein, 29 aa, Artificial Sequence
  Synthetic peptide
  MISC_FEATURE: c-term amidation
  MOD_RES (2)..(2): D-Ala
  MOD_RES (16)..(16): Cys-PEG
HXEGTFTSDYSKYLDCQAAKEFIAWLVKG

SEQ ID NO: 374 - protein, 29 aa, Artificial Sequence
  Synthetic peptide
  MISC_FEATURE: c-term amidation
HSQGTFTSDYSKYLDERRAQDFVQWLMDT

SEQ ID NO: 375 - protein, 29 aa, Artificial Sequence
  Synthetic peptide
  MISC_FEATURE: c-term amidation
HSQGTFTSDYSKYLDERRAKDFVQWLMDT

SEQ ID NO: 376 - protein, 29 aa, Artificial Sequence
  Synthetic peptide
  MISC_FEATURE: c-term amidation
  MISC_FEATURE (16)..(20): Lactam ring between side chains at positions 16 and 20
HSQGTFTSDYSKYLDERRAKDFVQWLMDT

SEQ ID NO: 377 - protein, 29 aa, Artificial Sequence
  Synthetic peptide
  MISC_FEATURE: c-term amidation
  MISC_FEATURE (12)..(16): Lactam ring between side chains at positions 12 and 16
HSQGTFTSDYSKYLDERRAQDFVQWLMDT

SEQ ID NO: 378 - protein, 29 aa, Artificial Sequence
  Synthetic peptide
  MISC_FEATURE: c-term amidation
  MISC_FEATURE (12)..(16): Lactam ring between side chains at positions 12 and 16
HSQGTFTSDYSKYLDERRAKDFVQWLMDT

SEQ ID NO: 379 - protein, 29 aa, Artificial Sequence
  Synthetic peptide
  MISC_FEATURE: c-term amidation
  MISC_FEATURE (16)..(20): Lactam ring between side chains at positions 16 and 20
HSQGTFTSDYSKYLDKRRAEDFVQWLMDT

SEQ ID NO: 380 - protein, 29 aa, Artificial Sequence
  Synthetic peptide
  MISC_FEATURE: c-term amidation
HSQGTFTSDYSKYLDERAAKDFVQWLMDT

SEQ ID NO: 381 - protein, 29 aa, Artificial Sequence
  Synthetic peptide
  MISC_FEATURE: c-term amidation; lactam ring between side chains at positions 16 and 20
HSQGTFTSDYSKYLDERAAKDFVQWLMDT

SEQ ID NO: 382 - protein, 29 aa, Artificial Sequence
  Synthetic peptide
  MISC_FEATURE: c-term amidation
  MISC_FEATURE (12)..(16): Lactam ring between side chains at positions 12 and 16
HSQGTFTSDYSKYLDERAAQDFVQWLMDT

SEQ ID NO: 383 - protein, 29 aa, Artificial Sequence
  Synthetic peptide
  MISC_FEATURE: c-term amidation
  MISC_FEATURE (12)..(16): Lactam ring between side chains at positions 12 and 16
HSQGTFTSDYSKYLDERAAKDFVQWLMDT

SEQ ID NO: 384 - protein, 29 aa, Artificial Sequence
  Synthetic peptide
  MISC_FEATURE: c-term amidation
  MISC_FEATURE (16)..(20): Lactam ring between side chains at positions 16 and 20
HSQGTFTSDYSKYLDKRAAEDFVQWLMDT

SEQ ID NO: 385 - protein, 29 aa, Artificial Sequence
  Synthetic peptide
  MISC_FEATURE: c-term amidation
HSQGTFTSDYSKYLDEQAAKEFIAWLMDT

SEQ ID NO: 386 - protein, 29 aa, Artificial Sequence
  Synthetic peptide
  MISC_FEATURE: c-term amidation
  MISC_FEATURE (12)..(16): Lactam ring between side chains at positions 12 and 16
HSQGTFTSDYSKYLDEQAAKEFIAWLMDT

SEQ ID NO: 387 - protein, 29 aa, Artificial Sequence
  Synthetic peptide
  MISC_FEATURE: c-term amidation
  MISC_FEATURE (16)..(20): Lactam ring between side chains at positions 16 and 20
HSQGTFTSDYSKYLDEQAAKEFIAWLMDT

SEQ ID NO: 388 - protein, 29 aa, Artificial Sequence
  Synthetic peptide
  MISC_FEATURE: c-term amidation
  MOD_RES (1)..(1): (Des-amino)His
XSQGTFTSDYSKYLDERRAQDFVQWLMDT

SEQ ID NO: 389 - protein, 29 aa, Artificial Sequence
  Synthetic peptide
  MISC_FEATURE: c-term amidation
  MOD_RES (1)..(1): (Des-amino)His
XSQGTFTSDYSKYLDERRAKDFVQWLMDT

SEQ ID NO: 390 - protein, 29 aa, Artificial Sequence
  Synthetic peptide
  MISC_FEATURE: c-term amidation
  MOD_RES (1)..(1): (Des-amino)His
  MISC_FEATURE (16)..(20): Lactam ring between side chains at positions 16 and 20
XSQGTFTSDYSKYLDERRAKDFVQWLMDT

SEQ ID NO: 391 - protein, 29 aa, Artificial Sequence
  Synthetic peptide
  MISC_FEATURE: c-term amidation
  MOD_RES (1)..(1): (Des-amino)His
  MISC_FEATURE (12)..(16): Lactam ring between side chains at positions 12 and 16
XSQGTFTSDYSKYLDERRAQDFVQWLMDT

SEQ ID NO: 392 - protein, 29 aa, Artificial Sequence
  Synthetic peptide
  misc_feature (1)..(1): Xaa can be any naturally occurring amino acid
XSQGTFTSDYSKYLDERRAKDFVQWLMDT

SEQ ID NO: 393 - protein, 29 aa, Artificial Sequence
  Synthetic peptide
  MISC_FEATURE: c-term amidation
  MOD_RES (1)..(1): (Des-amino)His
  MISC_FEATURE (16)..(20): Lactam ring between side chains at positions 16 and 20
XSQGTFTSDYSKYLDKRRAEDFVQWLMDT

SEQ ID NO: 394 - protein, 29 aa, Artificial Sequence
  Synthetic peptide
  MISC_FEATURE: c-term amidation
  MOD_RES (1)..(1): (Des-amino)His
XSQGTFTSDYSKYLDERAAKDFVQWLMDT

SEQ ID NO: 395 - protein, 29 aa, Artificial Sequence
  Synthetic peptide
  MISC_FEATURE: c-term amidation
  MOD_RES (1)..(1): (Des-amino)His
  MISC_FEATURE (16)..(20): Lactam ring between side chains at positions 16 and 20
XSQGTFTSDYSKYLDERAAKDFVQWLMDT

SEQ ID NO: 396 - protein, 29 aa, Artificial Sequence
  Synthetic peptide
  MISC_FEATURE: c-term amidation
  MOD_RES (1)..(1): (Des-amino)His
  MISC_FEATURE (12)..(16): Lactam ring between side chains at positions 12 and 16
XSQGTFTSDYSKYLDERAAQDFVQWLMDT

SEQ ID NO: 397 - protein, 29 aa, Artificial Sequence
  Synthetic peptide
  MISC_FEATURE: c-term amidation
  MOD_RES (1)..(1): (Des-amino)His
  MISC_FEATURE (12)..(16): Lactam ring between side chains at positions 12 and 16
XSQGTFTSDYSKYLDERAAKDFVQWLMDT

SEQ ID NO: 398 - protein, 29 aa, Artificial Sequence
  Synthetic peptide
  MISC_FEATURE: c-term amidation
  MOD_RES (1)..(1): (Des-amino)His
  MISC_FEATURE (16)..(20): Lactam ring between side chains at positions 16 and 20
XSQGTFTSDYSKYLDKRAAEDFVQWLMDT

SEQ ID NO: 399 - protein, 29 aa, Artificial Sequence
  Synthetic peptide
  MISC_FEATURE: c-term amidation
  MOD_RES (1)..(1): (Des-amino)His
XSQGTFTSDYSKYLDEQAAKEFIAWLMDT

SEQ ID NO: 400 - protein, 29 aa, Artificial Sequence
  Synthetic peptide
  MISC_FEATURE: c-term amidation
  MOD_RES (1)..(1): (Des-amino)His
  MISC_FEATURE (12)..(16): Lactam ring between side chains at positions 12 and 16
XSQGTFTSDYSKYLDEQAAKEFIAWLMDT

SEQ ID NO: 401 - protein, 29 aa, Artificial Sequence
  Synthetic peptide
  MISC_FEATURE: c-term amidation
  MOD_RES (1)..(1): (Des-amino)His
  MISC_FEATURE (16)..(20): Lactam ring between side chains at positions 16 and 20
XSQGTFTSDYSKYLDEQAAKEFIAWLMDT

SEQ ID NO: 402 - protein, 29 aa, Artificial Sequence
  Synthetic peptide
  MISC_FEATURE: c-term amidation
  MOD_RES (2)..(2): Aminoisobutyric acid
HXQGTFTSDYSKYLDERRAQDFVQWLMDT

SEQ ID NO: 403 - protein, 29 aa, Artificial Sequence
  Synthetic peptide
  MISC_FEATURE: c-term amidation
  MOD_RES (2)..(2): Aminoisobutyric acid
HXQGTFTSDYSKYLDERRAKDFVQWLMDT

SEQ ID NO: 404 - protein, 29 aa, Artificial Sequence
  Synthetic peptide
  MISC_FEATURE: c-term amidation
  MOD_RES (2)..(2): Aminoisobutyric acid
  MISC_FEATURE (16)..(20): Lactam ring between side chains at positions 16 and 20
HXQGTFTSDYSKYLDERRAKDFVQWLMDT

SEQ ID NO: 405 - protein, 29 aa, Artificial Sequence
  Synthetic peptide
  MISC_FEATURE: c-term amidation
  MOD_RES (2)..(2): aminoisobutyric acid
  MISC_FEATURE (12)..(16): Lactam ring between side chains at positions 12 and 16
HXQGTFTSDYSKYLDERRAQDFVQWLMDT

SEQ ID NO: 406 - protein, 29 aa, Artificial Sequence
  Synthetic peptide
  MISC_FEATURE: c-term amidation
  MOD_RES (2)..(2): Aminoisobutyric acid
  MISC_FEATURE (12)..(16): Lactam ring between side chains at positions 12 and 16
HXQGTFTSDYSKYLDERRAKDFVQWLMDT

SEQ ID NO: 407 - protein, 29 aa, Artificial Sequence
  Synthetic peptide
  MISC_FEATURE: c-term amidation
  MOD_RES (2)..(2): Aminoisobutyric acid
  MISC_FEATURE (16)..(20): Lactam ring between side chains at positions 16 and 20
HXQGTFTSDYSKYLDKRRAEDFVQWLMDT

SEQ ID NO: 408 - protein, 29 aa, Artificial Sequence
  Synthetic peptide
  MOD_RES (2)..(2): Aminoisobutyric acid
  MISC_FEATURE (2)..(2): c-term amidation
HXQGTFTSDYSKYLDERAAKDFVQWLMDT

SEQ ID NO: 409 - protein, 29 aa, Artificial Sequence
  Synthetic peptide
  MISC_FEATURE: c-term amidation
  MOD_RES (2)..(2): Aminoisobutyric acid
  MISC_FEATURE (16)..(20): Lactam ring between side chains at positions 16 and 20
HXQGTFTSDYSKYLDERAAKDFVQWLMDT

SEQ ID NO: 410 - protein, 29 aa, Artificial Sequence
  Synthetic peptide
  MISC_FEATURE: c-term amidation
  MOD_RES (2)..(2): Aminoisobutyric acid
  MISC_FEATURE (12)..(16): Lactam ring between side chains at positions 12 and 16
HXQGTFTSDYSKYLDERAAQDFVQWLMDT

SEQ ID NO: 411 - protein, 29 aa, Artificial Sequence
  Synthetic peptide
  MISC_FEATURE: c-term amidation
  MOD_RES (2)..(2): Aminoisobutyric acid
  MISC_FEATURE (12)..(16): Lactam ring between side chains at positions 12 and 16
HXQGTFTSDYSKYLDERAAKDFVQWLMDT

SEQ ID NO: 412 - protein, 29 aa, Artificial Sequence
  Synthetic peptide
  MISC_FEATURE: c-term amidation
  MOD_RES (2)..(2): Aminoisobutyric acid
  MISC_FEATURE (12)..(16): Lactam ring between side chains at positions 16 and 20
HXQGTFTSDYSKYLDKRAAEDFVQWLMDT

SEQ ID NO: 413 - protein, 29 aa, Artificial Sequence
  Synthetic peptide
  MISC_FEATURE: c-term amidation
  MOD_RES (2)..(2): Aminoisobutyric acid
HXQGTFTSDYSKYLDEQAAKEFIAWLMDT

SEQ ID NO: 414 - protein, 29 aa, Artificial Sequence
  Synthetic peptide
  MISC_FEATURE: c-term amidation
  MOD_RES (2)..(2): Aminoisobutyric acid
  MISC_FEATURE (12)..(16): Lactam ring between side chains at positions 12 and 16
HXQGTFTSDYSKYLDEQAAKEFIAWLMDT

SEQ ID NO: 415 - protein, 29 aa, Artificial Sequence
  Synthetic peptide
  MISC_FEATURE: c-term amidation
  MOD_RES (2)..(2): Aminoisobutyric acid
  MISC_FEATURE (16)..(20): Lactam ring between side chains at positions 16 and 20
HXQGTFTSDYSKYLDEQAAKEFIAWLMDT

SEQ ID NO: 416 - protein, 29 aa, Artificial Sequence
  Synthetic peptide
  MISC_FEATURE: c-term amidation
  MOD_RES (2)..(2): D-Ala
HXQGTFTSDYSKYLDERRAQDFVQWLMDT

SEQ ID NO: 417 - protein, 29 aa, Artificial Sequence
  Synthetic peptide
  MISC_FEATURE: c-term amidation
  MOD_RES (2)..(2): D-Ala
HXQGTFTSDYSKYLDERRAKDFVQWLMDT

SEQ ID NO: 418 - protein, 29 aa, Artificial Sequence
  Synthetic peptide
  MISC_FEATURE: c-term amidation
  MOD_RES (2)..(2): D-Ala
  MISC_FEATURE (16)..(20): Lactam ring between side chains at positions 16 and 20
HXQGTFTSDYSKYLDERRAKDFVQWLMDT

SEQ ID NO: 419 - protein, 29 aa, Artificial Sequence
  Synthetic peptide
  MISC_FEATURE: c-term amidation
  MOD_RES (2)..(2): D-Ala
  MISC_FEATURE (12)..(16): Lactam ring between side chains at positions 12 and 16
HXQGTFTSDYSKYLDERRAQDFVQWLMDT

SEQ ID NO: 420 - protein, 29 aa, Artificial Sequence
  Synthetic peptide
  MISC_FEATURE: c-term amidation
  MOD_RES (2)..(2): D-Ala
  MISC_FEATURE (12)..(16): Lactam ring between side chains at positions 12 and 16
HXQGTFTSDYSKYLDERRAKDFVQWLMDT

SEQ ID NO: 421 - protein, 29 aa, Artificial Sequence
  Synthetic peptide
  MISC_FEATURE: c-term amidation
  MOD_RES (2)..(2): D-Ala
  MISC_FEATURE (16)..(20): Lactam ring between side chains at positions 16 and 20
HXQGTFTSDYSKYLDKRRAEDFVQWLMDT

SEQ ID NO: 422 - protein, 29 aa, Artificial Sequence
  Synthetic peptide
  MISC_FEATURE: c-term amidation
  MOD_RES (2)..(2): D-Ala
HXQGTFTSDYSKYLDERAAKDFVQWLMDT

SEQ ID NO: 423 - protein, 29 aa, Artificial Sequence
  Synthetic peptide
  MISC_FEATURE: c-term amidation
  MOD_RES (2)..(2): D-Ala
  MISC_FEATURE (16)..(20): Lactam ring between side chains at positions 16 and 20
HXQGTFTSDYSKYLDERAAKDFVQWLMDT

SEQ ID NO: 424 - protein, 29 aa, Artificial Sequence
  Synthetic peptide
  MISC_FEATURE: c-term amidation
  MOD_RES (2)..(2): D-Ala
  MISC_FEATURE (12)..(16): Lactam ring between side chains at positions 12 and 16
HXQGTFTSDYSKYLDERAAQDFVQWLMDT

SEQ ID NO: 425 - protein, 29 aa, Artificial Sequence
  Synthetic peptide
  MISC_FEATURE: c-term amidation
  MOD_RES (2)..(2): D-Ala
  MISC_FEATURE (12)..(16): Lactam ring between side chains at positions 12 and 16
HXQGTFTSDYSKYLDERAAKDFVQWLMDT

SEQ ID NO: 426 - protein, 29 aa, Artificial Sequence
  Synthetic peptide
  MISC_FEATURE: c-term amidation
  MOD_RES (2)..(2): D-Ala
  MISC_FEATURE (16)..(20): Lactam ring between side chains at positions 16 and 20
HXQGTFTSDYSKYLDKRAAEDFVQWLMDT

SEQ ID NO: 427 - protein, 29 aa, Artificial Sequence
  Synthetic peptide
  MISC_FEATURE: c-term amidation
  MOD_RES (2)..(2): D-Ala
HXQGTFTSDYSKYLDEQAAKEFIAWLMDT

SEQ ID NO: 428 - protein, 29 aa, Artificial Sequence
  Synthetic peptide
  MISC_FEATURE: c-term amidation
  MOD_RES (2)..(2): D-Ala
  MISC_FEATURE (12)..(16): Lactam ring between side chains at positions 12 and 16
HXQGTFTSDYSKYLDEQAAKEFIAWLMDT

SEQ ID NO: 429 - protein, 29 aa, Artificial Sequence
  Synthetic peptide
  MISC_FEATURE: c-term amidation
  MOD_RES (2)..(2): D-Ala
  MISC_FEATURE (16)..(20): Lactam ring between side chains at positions 16 and 20
HXQGTFTSDYSKYLDEQAAKEFIAWLMDT

SEQ ID NO: 430 - protein, 29 aa, Artificial Sequence
  Synthetic peptide
  MISC_FEATURE: c-term amidation
HSEGTFTSDYSKYLDERRAQDFVQWLMDT

SEQ ID NO: 431 - protein, 29 aa, Artificial Sequence
  Synthetic peptide
  MISC_FEATURE: c-term amidation
HSEGTFTSDYSKYLDERRAKDFVQWLMDT

SEQ ID NO: 432 - protein, 29 aa, Artificial Sequence
  Synthetic peptide
  MISC_FEATURE: c-term amidation
  MISC_FEATURE (16)..(20): Lactam ring between side chains at positions 16 and 20
HSEGTFTSDYSKYLDERRAKDFVQWLMDT

SEQ ID NO: 433 - protein, 29 aa, Artificial Sequence
  Synthetic peptide
  MISC_FEATURE: c-term amidation
  MISC_FEATURE (16)..(16): Lactam ring between side chains at positions 12 and 16
HSEGTFTSDYSKYLDERRAQDFVQWLMDT

SEQ ID NO: 434 - protein, 29 aa, Artificial Sequence
  Synthetic peptide
  MISC_FEATURE: c-term amidation
  MISC_FEATURE (12)..(16): Lactam ring between side chains at positions 12 and 16
HSEGTFTSDYSKYLDERRAKDFVQWLMDT

SEQ ID NO: 435 - protein, 29 aa, Artificial Sequence
  Synthetic peptide
  MISC_FEATURE: c-term amidation
  MISC_FEATURE (16)..(20): Lactam ring between side chains at positions 16 and 20
HSEGTFTSDYSKYLDKRRAEDFVQWLMDT

SEQ ID NO: 436 - protein, 29 aa, Artificial Sequence
  Synthetic peptide
  MISC_FEATURE: c-term amidation
HSEGTFTSDYSKYLDERAAKDFVQWLMDT

SEQ ID NO: 437 - protein, 29 aa, Artificial Sequence
  Synthetic peptide
  MISC_FEATURE: c-term amidation
  MISC_FEATURE: Lactam ring between side chains at positions 16 and 20
HSEGTFTSDYSKYLDERAAKDFVQWLMDT

SEQ ID NO: 438 - protein, 29 aa, Artificial Sequence
  Synthetic peptide
  MISC_FEATURE: c-term amidation
  MISC_FEATURE (12)..(16): Lactam ring between side chains at positions 12 and 16
HSEGTFTSDYSKYLDERAAQDFVQWLMDT

SEQ ID NO: 439 - protein, 29 aa, Artificial Sequence
  Synthetic peptide
  MISC_FEATURE: c-term amidation
  MISC_FEATURE (12)..(16): Lactam ring between side chains at positions 12 and 16
HSEGTFTSDYSKYLDERAAKDFVQWLMDT

SEQ ID NO: 440 - protein, 29 aa, Artificial Sequence
  Synthetic peptide
  MISC_FEATURE: c-term amidation
  MISC_FEATURE (16)..(20): Lactam ring between side chains at positions 16 and 20
HSEGTFTSDYSKYLDKRAAEDFVQWLMDT

SEQ ID NO: 441 - protein, 29 aa, Artificial Sequence
  Synthetic peptide
  MISC_FEATURE: c-term amidation
HSEGTFTSDYSKYLDEQAAKEFIAWLMDT

SEQ ID NO: 442 - protein, 29 aa, Artificial Sequence
  Synthetic peptide
  MISC_FEATURE: c-term amidation
  MISC_FEATURE (12)..(16): Lactam ring between side chains at positions 12 and 16
HSEGTFTSDYSKYLDEQAAKEFIAWLMDT

SEQ ID NO: 443 - protein, 29 aa, Artificial Sequence
  Synthetic peptide
  MISC_FEATURE: c-term amidation
  MISC_FEATURE (16)..(20): Lactam ring between side chains at positions 16 and 20
HSEGTFTSDYSKYLDEQAAKEFIAWLMDT

SEQ ID NO: 444 - protein, 29 aa, Artificial Sequence
  Synthetic peptide
  MISC_FEATURE: c-term amidation
  MOD_RES (1)..(1): (Des-amino)His
XSEGTFTSDYSKYLDERRAQDFVQWLMDT

SEQ ID NO: 445 - protein, 29 aa, Artificial Sequence
  Synthetic peptide
  MISC_FEATURE: c-term amidation
  MOD_RES (1)..(1): (Des-amino)His
XSEGTFTSDYSKYLDERRAKDFVQWLMDT

SEQ ID NO: 446 - protein, 29 aa, Artificial Sequence
  Synthetic peptide
  MISC_FEATURE: c-term amidation
  MOD_RES (1)..(1): (Des-amino)His
  MISC_FEATURE (16)..(20): Lactam ring between side chains at positions 16 and 20
XSEGTFTSDYSKYLDERRAKDFVQWLMDT

SEQ ID NO: 447 - protein, 29 aa, Artificial Sequence
  Synthetic peptide
  MISC_FEATURE: c-term amidation
  MISC_FEATURE: Lactam ring between side chains at positions 12 and 16
  MOD_RES (1)..(1): (Des-amino)His
XSEGTFTSDYSKYLDERRAQDFVQWLMDT

SEQ ID NO: 448 - protein, 29 aa, Artificial Sequence
  Synthetic peptide
  MISC_FEATURE: c-term amidation
  MOD_RES (1)..(1): (Des-amino)His
  MISC_FEATURE (12)..(16): Lactam ring between side chains at positions 12 and 16
XSEGTFTSDYSKYLDERRAKDFVQWLMDT

SEQ ID NO: 449 - protein, 29 aa, Artificial Sequence
  Synthetic peptide
  MISC_FEATURE: c-term amidation
  MOD_RES (1)..(1): (Des-amino)His
  MISC_FEATURE (16)..(20): Lactam ring between side chains at positions 16 and 20
XSEGTFTSDYSKYLDKRRAEDFVQWLMDT

SEQ ID NO: 450 - protein, 29 aa, Artificial Sequence
  Synthetic peptide
  MISC_FEATURE: c-term amidation
  MOD_RES (1)..(1): (Des-amino)His
XSEGTFTSDYSKYLDERAAKDFVQWLMDT

SEQ ID NO: 451 - protein, 29 aa, Artificial Sequence
  Synthetic peptide
  MISC_FEATURE: c-term amidation
  MOD_RES (1)..(1): (Des-amino)His
  MISC_FEATURE (16)..(20): Lactam ring between side chains at positions 16 and 20
XSEGTFTSDYSKYLDERAAKDFVQWLMDT

SEQ ID NO: 452 - protein, 29 aa, Artificial Sequence
  Synthetic peptide
  MISC_FEATURE: C-term amidation
  MOD_RES (1)..(1): (Des-amino)His
  MISC_FEATURE (12)..(16): Lactam ring between side chains at positions 12 and 16
XSEGTFTSDYSKYLDERAAQDFVQWLMDT

SEQ ID NO: 453 - protein, 29 aa, Artificial Sequence
  Synthetic peptide
  MISC_FEATURE: c-term amidation
  MOD_RES (1)..(1): (Des-amino)His
  MISC_FEATURE (12)..(16): Lactam ring between side chains at positions 12 and 16
XSEGTFTSDYSKYLDERAAKDFVQWLMDT

SEQ ID NO: 454 - protein, 29 aa, Artificial Sequence
  Synthetic peptide
  MISC_FEATURE: c-term amidation
  MOD_RES (1)..(1): (Des-amino)His
  MISC_FEATURE (16)..(20): Lactam ring between side chains at positions 16 and 20
XSEGTFTSDYSKYLDKRAAEDFVQWLMDT

SEQ ID NO: 455 - protein, 29 aa, Artificial Sequence
  Synthetic peptide
  MISC_FEATURE: c-term amidation
  MOD_RES (1)..(1): (Des-amino)His
XSEGTFTSDYSKYLDEQAAKEFIAWLMDT

SEQ ID NO: 456 - protein, 29 aa, Artificial Sequence
  Synthetic peptide
  MISC_FEATURE: c-term amidation
  MOD_RES (1)..(1): (Des-amino)His
  MISC_FEATURE (12)..(16): Lactam ring between side chains at positions 12 and 16
XSEGTFTSDYSKYLDEQAAKEFIAWLMDT

SEQ ID NO: 457 - protein, 29 aa, Artificial Sequence
  Synthetic peptide
  MISC_FEATURE: c-term amidation
  MOD_RES (1)..(1): (Des-amino)His
  MISC_FEATURE (16)..(20): Lactam ring between side chains at positions 16 and 20
XSEGTFTSDYSKYLDEQAAKEFIAWLMDT

SEQ ID NO: 458 - protein, 29 aa, Artificial Sequence
  Synthetic peptide
  MISC_FEATURE: c-term amidation
  MOD_RES (2)..(2): Aminoisobutyric acid
HXEGTFTSDYSKYLDERRAQDFVQWLMDT

SEQ ID NO: 459 - protein, 29 aa, Artificial Sequence
  Synthetic peptide
  MISC_FEATURE: c-term amidation
  MOD_RES (2)..(2): Aminoisobutyric acid
HXEGTFTSDYSKYLDERRAKDFVQWLMDT

SEQ ID NO: 460 - protein, 29 aa, Artificial Sequence
  Synthetic peptide
  MISC_FEATURE: c-term amidation
  MOD_RES (2)..(2): Aminoisobutyric acid
  MISC_FEATURE (16)..(20): Lactam ring between side chains at positions 16 and 20
HXEGTFTSDYSKYLDERRAKDFVQWLMDT

SEQ ID NO: 461 - protein, 29 aa, Artificial Sequence
  Synthetic peptide
  MISC_FEATURE: c-term amidation
  MOD_RES (2)..(2): Aminoisobutyric acid
  MISC_FEATURE (12)..(16): Lactam ring between side chains at positions 12 and 16
HXEGTFTSDYSKYLDERRAQDFVQWLMDT

SEQ ID NO: 462 - protein, 29 aa, Artificial Sequence
  Synthetic peptide
  MISC_FEATURE: c-term amidation
  MOD_RES (2)..(2): Aminoisobutyric acid
  MISC_FEATURE (12)..(16): Lactam ring between side chains at positions 12 and 16
HXEGTFTSDYSKYLDERRAKDFVQWLMDT

SEQ ID NO: 463 - protein, 29 aa, Artificial Sequence
  Synthetic peptide
  MISC_FEATURE: c-term amidation
  MOD_RES (2)..(2): Aminoisobutyric acid
  MISC_FEATURE (16)..(20): Lactam ring between side chains at positions 16 and 20
HXEGTFTSDYSKYLDKRRAEDFVQWLMDT

SEQ ID NO: 464 - protein, 29 aa, Artificial Sequence
  Synthetic peptide
  MISC_FEATURE: c-term amidation
  MOD_RES (2)..(2): Aminoisobutyric acid
HXEGTFTSDYSKYLDERAAKDFVQWLMDT

SEQ ID NO: 465 - protein, 29 aa, Artificial Sequence
  Synthetic peptide
  MISC_FEATURE: c-term amidation
  MOD_RES (2)..(2): Aminoisobutyric acid
  MISC_FEATURE (16)..(20): Lactam ring between side chains at positions 16 and 20
HXEGTFTSDYSKYLDERAAKDFVQWLMDT

SEQ ID NO: 466 - protein, 29 aa, Artificial Sequence
  Synthetic peptide
  MISC_FEATURE: c-term amidation
  MOD_RES (2)..(2): Aminoisobutyric acid
  MISC_FEATURE (12)..(16): Lactam ring between side chains at postions 12 and 16
HXEGTFTSDYSKYLDERAAQDFVQWLMDT

SEQ ID NO: 467 - protein, 29 aa, Artificial Sequence
  Synthetic peptide
  MISC_FEATURE: c-term amidation
  MOD_RES (2)..(2): Aminoisobutyric acid
  MISC_FEATURE (12)..(16): Lactam ring between side chains at positions 12 and 16
HXEGTFTSDYSKYLDERAAKDFVQWLMDT

SEQ ID NO: 468 - protein, 29 aa, Artificial Sequence
  Synthetic peptide
  MISC_FEATURE: c-term amidation
  MOD_RES (2)..(2): Aminoisobutyric acid
  MISC_FEATURE (12)..(16): Lactam ring between side chains at positions 16 and 20
HXEGTFTSDYSKYLDKRAAEDFVQWLMDT

SEQ ID NO: 469 - protein, 29 aa, Artificial Sequence
  Synthetic peptide
  MISC_FEATURE: c-term amidation
  MOD_RES (2)..(2): Aminoisobutyric acid
HXEGTFTSDYSKYLDEQAAKEFIAWLMDT

SEQ ID NO: 470 - protein, 29 aa, Artificial Sequence
  Synthetic peptide
  MISC_FEATURE: c-term amidation
  MOD_RES (2)..(2): Aminoisobutyric acid
  MISC_FEATURE (12)..(16): Lactam ring between side chains at positions 12 and 16
HXEGTFTSDYSKYLDEQAAKEFIAWLMDT

SEQ ID NO: 471 - protein, 29 aa, Artificial Sequence
  Synthetic peptide
  MISC_FEATURE: c-term amidation
  MOD_RES (2)..(2): Aminoisobutyric acid
  MISC_FEATURE (16)..(20): Lactam ring between side chains at positions 16 and 20
HXEGTFTSDYSKYLDEQAAKEFIAWLMDT

SEQ ID NO: 472 - protein, 29 aa, Artificial Sequence
  Synthetic peptide
  MISC_FEATURE: c-term amidation
  MOD_RES (2)..(2): D-Ala
HXEGTFTSDYSKYLDERRAQDFVQWLMDT

SEQ ID NO: 473 - protein, 29 aa, Artificial Sequence
  Synthetic peptide
  MISC_FEATURE: c-term amidation
  MOD_RES (2)..(2): D-Ala
HXEGTFTSDYSKYLDERRAKDFVQWLMDT

SEQ ID NO: 474 - protein, 29 aa, Artificial Sequence
  Synthetic peptide
  MISC_FEATURE: c-term amidation
  MOD_RES (2)..(2): D-Ala
  MISC_FEATURE (16)..(20): Lactam ring between side chains at positions 16 and 20
HXEGTFTSDYSKYLDERRAKDFVQWLMDT

SEQ ID NO: 475 - protein, 29 aa, Artificial Sequence
  Synthetic peptide
  MISC_FEATURE: c-term amidation
  MOD_RES (2)..(2): D-Ala
  MISC_FEATURE (12)..(16): Lactam ring between side chains at positions 12 and 16
HXEGTFTSDYSKYLDERRAQDFVQWLMDT

SEQ ID NO: 476 - protein, 29 aa, Artificial Sequence
  Synthetic peptide
  MISC_FEATURE: c-term amidation
  MOD_RES (2)..(2): D-Ala
  MISC_FEATURE (12)..(16): Lactam ring between side chains at positions 12 and 16
HXEGTFTSDYSKYLDERRAKDFVQWLMDT

SEQ ID NO: 477 - protein, 29 aa, Artificial Sequence
  Synthetic peptide
  MISC_FEATURE: c-term amidation
  MOD_RES (2)..(2): D-Ala
  MISC_FEATURE (16)..(20): Lactam ring between side chains at positions 16 and 20
HXEGTFTSDYSKYLDKRRAEDFVQWLMDT

SEQ ID NO: 478 - protein, 29 aa, Artificial Sequence
  Synthetic peptide
  MISC_FEATURE: c-term amidation
  MOD_RES (2)..(2): D-Ala
HXEGTFTSDYSKYLDERAAKDFVQWLMDT

SEQ ID NO: 479 - protein, 29 aa, Artificial Sequence
  Synthetic peptide
  MISC_FEATURE: c-term amidation
  MOD_RES (2)..(2): D-Ala
  MISC_FEATURE (16)..(20): Lactam ring between side chains at positions 16 and 20
HXEGTFTSDYSKYLDERAAKDFVQWLMDT

SEQ ID NO: 480 - protein, 29 aa, Artificial Sequence
  Synthetic peptide
  MISC_FEATURE: c-term amidation
  MOD_RES (2)..(2): D-Ala
  MISC_FEATURE (12)..(16): Lactam ring between side chains at positions 12 and 16
HXEGTFTSDYSKYLDERAAQDFVQWLMDT

SEQ ID NO: 481 - protein, 29 aa, Artificial Sequence
  Synthetic peptide
  MISC_FEATURE: c-term amidation
  MOD_RES (2)..(2): D-Ala
  MISC_FEATURE (12)..(16): Lactam ring between side chains at positions 12 and 16
HXEGTFTSDYSKYLDERAAKDFVQWLMDT

SEQ ID NO: 482 - protein, 29 aa, Artificial Sequence
  Synthetic peptide
  MISC_FEATURE: c-term amidation
  MOD_RES (2)..(2): D-Ala
  MISC_FEATURE (16)..(20): Lactam ring between side chains at positions 16 and 20
HXEGTFTSDYSKYLDKRAAEDFVQWLMDT

SEQ ID NO: 483 - protein, 29 aa, Artificial Sequence
  Synthetic peptide
  MISC_FEATURE: c-term amidation
  MOD_RES (2)..(2): D-Ala
HXEGTFTSDYSKYLDEQAAKEFIAWLMDT

SEQ ID NO: 484 - protein, 29 aa, Artificial Sequence
  Synthetic peptide
  MISC_FEATURE: c-term amidation
  MOD_RES (2)..(2): D-Ala
  MISC_FEATURE (12)..(16): Lactam ring between side chains at positions 12 and 16
HXEGTFTSDYSKYLDEQAAKEFIAWLMDT

SEQ ID NO: 485 - protein, 29 aa, Artificial Sequence
  Synthetic peptide
  MISC_FEATURE: c-term amidation
  MOD_RES (2)..(2): D-Ala
  MISC_FEATURE (16)..(20): Lactam ring between side chains at positions 16 and 20
HXEGTFTSDYSKYLDEQAAKEFIAWLMDT

SEQ ID NO: 486 - protein, 29 aa, Artificial Sequence
  Synthetic peptide
  MISC_FEATURE: c-term amidation
  MOD_RES (2)..(2): Aminoisobutyric acid
  MOD_RES (24)..(24): Cys-PEG
HXQGTFTSDYSKYLDEQAAKEFICWLMNT

SEQ ID NO: 487 - protein, 29 aa, Artificial Sequence
  Synthetic peptide
  MISC_FEATURE: c-term amidation
  MOD_RES (2)..(2): Aminoisobutyric acid
  MOD_RES (29)..(29): Cys-PEG
HXQGTFTSDYSKYLDEQAAKEFIAWLMNC

SEQ ID NO: 488 - protein, 40 aa, Artificial Sequence
  Synthetic peptide
  MISC_FEATURE: c-term amidation
  MOD_RES (2)..(2): Aminoisobutyric acid
  MOD_RES (40)..(40): Cys-PEG
HXQGTFTSDYSKYLDEQAAKEFIAWLMNGGPSSGAPPPSC

SEQ ID NO: 489 - protein, 40 aa, Artificial Sequence; identical to SEQ ID NO: 488
  Synthetic peptide
  MISC_FEATURE: c-term amidation
  MOD_RES (2)..(2): Aminoisobutyric acid
  MISC_FEATURE (16)..(20): Lactam ring between side chains at positions 16 and 20
  MOD_RES (40)..(40): Cys-PEG

SEQ ID NO: 490 - protein, 39 aa, Artificial Sequence
  Synthetic peptide
  MISC_FEATURE: c-term amidation
  MOD_RES (2)..(2): Aminoisobutyric acid
  MOD_RES (24)..(24): Cys-PEG
HXQGTFTSDYSKYLDEQAAKEFICWLMNGGPSSGAPPPS

SEQ ID NO: 491 - protein, 39 aa, Artificial Sequence; identical to SEQ ID NO: 490
  Synthetic peptide
  MISC_FEATURE: c-term amidation
  MOD_RES (2)..(2): Aminoisobutyric acid
  MISC_FEATURE (16)..(20): Lactam ring between side chains at positions 16 and 20
  MOD_RES (24)..(24): Cys-PEG

SEQ ID NO: 492 - protein, 29 aa, Artificial Sequence
  Synthetic peptide
  MISC_FEATURE: c-term amidation
  MOD_RES (2)..(2): Aminoisobutyric acid
  MOD_RES (24)..(24): Cys-PEG
HXQGTFTSDYSKYLDERAAKDFVCWLMNT

SEQ ID NO: 493 - protein, 29 aa, Artificial Sequence
  Synthetic peptide
  MISC_FEATURE: c-term amidation
  MOD_RES (2)..(2): Aminoisobutyric acid
  MOD_RES (24)..(24): Cys-PEG
HXQGTFTSDYSKYLDERAAKDFVQWLMNC

SEQ ID NO: 494 - protein, 40 aa, Artificial Sequence
  Synthetic peptide
  MISC_FEATURE: c-term amidation
  MOD_RES (2)..(2): Aminoisobutyric acid
  MOD_RES (24)..(24): Cys-PEG
HXQGTFTSDYSKYLDERAAKDFVQWLMNGGPSSGAPPPSC

SEQ ID NO: 495 - protein, 40 aa, Artificial Sequence; identical to SEQ ID NO: 494
  Synthetic peptide
  MISC_FEATURE: c-term amidation
  MOD_RES (2)..(2): Aminoisobutyric acid
  MISC_FEATURE (16)..(20): Lactam ring between side chains at positions 16 and 20
  MOD_RES (40)..(40): Cys-PEG

SEQ ID NO: 496 - protein, 39 aa, Artificial Sequence
  Synthetic peptide
  MISC_FEATURE: c-term amidation
  MOD_RES (2)..(2): Aminoisobutyric acid
  MOD_RES (24)..(24): Cys-PEG
HXQGTFTSDYSKYLDERAAKDFVCWLMNGGPSSGAPPPS

SEQ ID NO: 497 - protein, 39 aa, Artificial Sequence; identical to SEQ ID NO: 496
  Synthetic peptide
  MISC_FEATURE: c-term amidation
  MOD_RES (2)..(2): Aminoisobutyric acid
  MISC_FEATURE (16)..(20): Lactam ring between side chains at positions 16 and 20
  MOD_RES (24)..(24): Cys-PEG

SEQ ID NO: 498 - protein, 30 aa, Artificial Sequence
  Synthetic peptide
  MISC_FEATURE: c-term amidation
  MOD_RES (2)..(2): Aminoisobutyric acid
  MOD_RES (24)..(24): Cys-PEG
HXQGTFTSDYSKYLDERRAKDFVCWLMNTA

SEQ ID NO: 499 - protein, 29 aa, Artificial Sequence
  Synthetic peptide
  MISC_FEATURE: c-term amidation
  MOD_RES (2)..(2): Aminoisobutyric acid
  MOD_RES (24)..(24): Cys-PEG
HXQGTFTSDYSKYLDERRAKDFVQWLMNC

SEQ ID NO: 500 - protein, 40 aa, Artificial Sequence
  Synthetic peptide
  MISC_FEATURE: c-term amidation
  MOD_RES (2)..(2): Aminoisobutyric acid
  MOD_RES (40)..(40): Cys-PEG
HXQGTFTSDYSKYLDERRAKDFVQWLMNGGPSSGAPPPSC

SEQ ID NO: 501 - protein, 40 aa, Artificial Sequence; identical to SEQ ID NO: 500
  Synthetic peptide
  MISC_FEATURE: c-term amidation
  MOD_RES (2)..(2): Aminoisobutyric acid
  MISC_FEATURE (16)..(20): Lactam ring between side chains at positions 16 and 20
  MOD_RES (40)..(40): Cys-PEG

SEQ ID NO: 502 - protein, 39 aa, Artificial Sequence
  Synthetic peptide
  MISC_FEATURE: c-term amidation
  MOD_RES (2)..(2): Aminoisobutyric acid
  MOD_RES (24)..(24): Cys-PEG
HXQGTFTSDYSKYLDERRAKDFVCWLMNGGPSSGAPPPS

SEQ ID NO: 503 - protein, 39 aa, Artificial Sequence; identical to SEQ ID NO: 502
  Synthetic peptide
  MISC_FEATURE: c-term amidation
  MOD_RES (2)..(2): Aminoisobutyric acid
  MISC_FEATURE (16)..(20): Lactam ring between side chains at positions 16 and 20
  MOD_RES (24)..(24): Cys-PEG

SEQ ID NO: 504 - protein, 29 aa, Artificial Sequence
  Synthetic peptide
  MISC_FEATURE: c-term amidation
  MOD_RES (2)..(2): Aminoisobutyric acid
  MISC_FEATURE (16)..(20): Lactam ring between side chains at positions 16 and 20
  MOD_RES (24)..(24): Cys-PEG
HXQGTFTSDYSKYLDEQAAKEFICWLMNT

SEQ ID NO: 505 - protein, 29 aa, Artificial Sequence
  Synthetic peptide
  MISC_FEATURE: c-term amidation
  MOD_RES (1)..(1): Alpha, Alpha-Dimethyl Imidiazole Acetic Acid
  MISC_FEATURE (16)..(20): Lactam ring between side chains at positions 16 and 20
  MOD_RES (24)..(24): Cys-PEG
XSQGTFTSDYSKYLDEQAAKEFICWLMNT

SEQ ID NO: 506 - protein, 29 aa, Artificial Sequence
  Synthetic peptide
  MISC_FEATURE: c-term amidation
  MOD_RES (1)..(1): Alpha, Alpha-Dimethly Imidiazole Acetic Acid
  MISC_FEATURE (16)..(20): Lactam ring between side chains at positions 16 and 20
  MOD_RES (29)..(29): Cys-PEG
XSQGTFTSDYSKYLDEQAAKEFIAWLMNC

SEQ ID NO: 507 - protein, 40 aa, Artificial Sequence
  Synthetic peptide
  MISC_FEATURE: c-term amidation
  MOD_RES (1)..(1): Alpha, Alpha Dimethyl Imidiazole Acetic Acid
  MISC_FEATURE (16)..(20): Lactam ring between side chains at positions 16 and 20
  MOD_RES (40)..(40): Cys-PEG
XSQGTFTSDYSKYLDEQAAKEFIAWLMNGGPSSGAPPPSC

SEQ ID NO: 508 - protein, 40 aa, Artificial Sequence
  Synthetic peptide
  MISC_FEATURE: c-term amidation
  MOD_RES (1)..(1): Alpha, Alpha Dimethyl Imidiazole Acetic Acid
  MISC_FEATURE (16)..(20): Lactam ring between side chains at positions 16 and 20
  MOD_RES (40)..(40): Cys-PEG
XSQGTFTSDYSKYLDERRAKDFVQWLMNGGPSSGAPPPSC

SEQ ID NO: 509 - protein, 39 aa, Artificial Sequence
  Synthetic peptide
  MISC_FEATURE: c-term amidation
  MOD_RES (1)..(1): Alpha, Alpha Dimethyl Imidiazole Acetic Acid
  MISC_FEATURE (16)..(20): Lactam ring between side chains at positions 16 and 20
  MOD_RES (24)..(24): Cys-PEG
XSQGTFTSDYSKYLDEQAAKEFICWLMNGGPSSGAPPPS

SEQ ID NO: 510 - protein, 29 aa, Artificial Sequence
  Synthetic peptide
  MISC_FEATURE: c-term amidation
  MOD_RES (1)..(1): Alpha, Alpha Dimethyl Imidiazole Acetic Acid
  misc_feature (2)..(2): Xaa can be any naturally occurring amino acid
  MISC_FEATURE (16)..(20): Lactam ring between side chains at positions 16 and 20
  MOD_RES (24)..(24): Cys-PEG
HXQGTFTSDYSKYLDERRAKDFVCWLMNT

SEQ ID NO: 511 - protein, 29 aa, Artificial Sequence
  Synthetic peptide
  MISC_FEATURE: c-term amidation
  MOD_RES (2)..(2): Alpha, Alpha Dimethyl Imidiazole Acetic Acid
  MISC_FEATURE (16)..(20): Lactam ring between side chains at positions 16 and 20
  MOD_RES (24)..(24): Cys-PEG
HXQGTFTSDYSKYLDERRAKDFVCWLMNT

SEQ ID NO: 512 - protein, 29 aa, Artificial Sequence
  Synthetic peptide
  MISC_FEATURE: c-term amidation
  MOD_RES (1)..(1): Alpha, Alpha Dimethyl Imidiazole Acetic Acid
  MISC_FEATURE (16)..(20): Lactam ring between side chains at positions 16 and 20
  MOD_RES (29)..(29): Cys-PEG
XSQGTFTSDYSKYLDERRAKDFVQWLMNC

SEQ ID NO: 513 - protein, 39 aa, Artificial Sequence
  Synthetic peptide
  MISC_FEATURE: c-term amidation
  MOD_RES (1)..(1): Alpha, Alpha Dimethyl Imidiazole Acetic Acid
  MISC_FEATURE (16)..(20): Lactam ring between side chains at positions 16 and 20
  MOD_RES (24)..(24): Cys-PEG
XSQGTFTSDYSKYLDERRAKDFVCWLMNGGPSSGAPPPS

SEQ ID NO: 514 - protein, 29 aa, Artificial Sequence
  Synthetic peptide
  MISC_FEATURE: c-term amidation
  MISC_FEATURE (16)..(20): Lactam ring between side chains at positions 16 and 20
  MOD_RES (24)..(24): Cys-PEG
HSQGTFTSDYSKYLDEQAAKEFICWLMNT

SEQ ID NO: 515 - protein, 11 aa, Artificial Sequence
  Synthetic peptide
GGPSSGAPPPS

SEQ ID NO: 516 - protein, 12 aa, Artificial Sequence
  Synthetic peptide
  MOD_RES (12)..(12): Cys-PEG
GGPSSGAPPPSC

SEQ ID NO: 517 - protein, 29 aa, Artificial Sequence
  Synthetic peptide
  MISC_FEATURE: c-term amidation
  MOD_RES (2)..(2): Aminoisobutyric acid
  MISC_FEATURE (16)..(20): Lactam ring between side chains at positions 16 and 20
  MOD_RES (24)..(24): Cys-PEG
HXQGTFTSDYSKYLDERRAKDFVCWLMNT

SEQ ID NO: 518 - protein, 29 aa, Artificial Sequence
  Synthetic peptide
  MISC_FEATURE: c-term amidation
  MOD_RES (24)..(24): Cys-PEG
HSQGTFTSDYSKYLDEQAAKEFICWLMNT

SEQ ID NO: 519 - protein, 29 aa, Artificial Sequence
  Synthetic peptide
  MISC_FEATURE: c-term amidation
  MOD_RES (1)..(1): Alpha, Alpha Dimethly Imidiazole Acetic Acid
  MOD_RES (24)..(24): Cys-PEG
XSQGTFTSDYSKYLDEQAAKEFICWLMNT

SEQ ID NO: 520 - protein, 29 aa, Artificial Sequence
  Synthetic peptide
  MISC_FEATURE: c-term amidation
  MOD_RES (1)..(1): Alpha, Alpha Dimethyl Imidiazole Acetic Acid
  MOD_RES (29)..(29): Cys-PEG
XSQGTFTSDYSKYLDEQAAKEFIAWLMNC

SEQ ID NO: 521 - protein, 39 aa, Artificial Sequence; identical to SEQ ID NO: 36
  Synthetic peptide
  MISC_FEATURE: c-term amidation

SEQ ID NO: 522 - protein, 39 aa, Artificial Sequence
  Synthetic peptide
  MISC_FEATURE: c-term amidation
HSQGTFTSDYSKYLDSRRAQDFVQWLMNGGPSSGAPPPS

SEQ ID NO: 523 - protein, 39 aa, Artificial Sequence
  Synthetic peptide
  MISC_FEATURE: c-term amidation
HSQGTFTSDYSKYLDSRRAQDFVQWLMKGGPSSGAPPPS

SEQ ID NO: 524 - protein, 39 aa, Artificial Sequence
  Synthetic peptide
  MISC_FEATURE: c-term amidation
HSQGTFTSDYSKYLDSRRAQDFVQWLVKGGPSSGAPPPS

SEQ ID NO: 525 - protein, 39 aa, Artificial Sequence
  Synthetic peptide
  MISC_FEATURE: c-term amidation
HSQGTFTSDYSKYLDSRRAQDFVQWLMDGGPSSGAPPPS

SEQ ID NO: 526 - protein, 39 aa, Artificial Sequence
  Synthetic peptide
  MISC_FEATURE: c-term amidation
HSQGTFTSDYSKYLDERRAKDFVQWLMDGGPSSGAPPPS

SEQ ID NO: 527 - protein, 30 aa, Artificial Sequence
  Synthetic peptide
  MISC_FEATURE: c-term amidation
HAEGTFTSDVSSYLEGQAAKEFIAWLVKGG

SEQ ID NO: 528 - protein, 29 aa, Artificial Sequence
  Synthetic peptide
  MISC_FEATURE: c-term amidation
  MOD_RES (2)..(2): Aminoisobutyric acid
  MISC_FEATURE (16)..(20): Lactam ring between side chains at positions 16 and 20
  MOD_RES (24)..(24): Cys-PEG
HXQGTFTSDYSKYLDERRAKDFVCWLMNT

SEQ ID NO: 529 - protein, 39 aa, Artificial Sequence; identical to SEQ ID NO: 513
  Synthetic peptide
  MISC_FEATURE: c-term amidation
  MOD_RES (1)..(1): Alpha, Alpha Dimethyl Imidiazole Acetic Acid
  MOD_RES (24)..(24): Cys-PEG

SEQ ID NO: 530 - protein, 29 aa, Artificial Sequence
  Synthetic peptide
  MISC_FEATURE: c-term amidation
  MOD_RES (1)..(1): Alpha, Alpha Dimethyl Imidiazole Acetic Acid
  MOD_RES (24)..(24): Cys-PEG
XSQGTFTSDYSKYLDERRAKDFVCWLMNT

SEQ ID NO: 531 - protein, 40 aa, Artificial Sequence
  Synthetic peptide
  MISC_FEATURE: c-term amidation
  MOD_RES (2)..(2): Aminoisobutyric acid
  MOD_RES (24)..(24): Cys-PEG
  MOD_RES (40)..(40): Cys-PEG
HXQGTFTSDYSKYLDERRAKEFICWLMNGGPSSGAPPPSC

SEQ ID NO: 532 - protein, 41 aa, Artificial Sequence
  Synthetic peptide
  MISC_FEATURE: c-term amidation
  MOD_RES (2)..(2): Aminoisobutyric acid
  MOD_RES (40)..(40): Cys-PEG
  MOD_RES (41)..(41): Cys-PEG
HXQGTFTSDYSKYLDEQAAKEFIAWLMNGGPSSGAPPPSCC

SEQ ID NO: 533 - protein, 39 aa, Artificial Sequence; identical to SEQ ID NO: 490
  Synthetic peptide
  MOD_RES (2)..(2): Aminoisobutyric acid
  MOD_RES (24)..(24): Cys-PEG
  MISC_FEATURE (24)..(24): c-term amidation

SEQ ID NO: 534 - protein, 29 aa, Artificial Sequence
  Synthetic peptide
  MISC_FEATURE: Chimera 2 AIB2 K10-C8 Cys 24-40K
  MISC_FEATURE: c-term amidation
  MOD_RES (2)..(2): Aminoisobutyric acid
  MOD_RES (10)..(10): Acylated with C8 fatty acid
  MOD_RES (24)..(24): Cys-PEG
HXQGTFTSDKSKYLDEQAAKEFICWLMNT

SEQ ID NO: 535 - protein, 29 aa, Artificial Sequence
  Synthetic peptide
  MISC_FEATURE: Chimera 2 AIB2 K10-C14 Cys 24-40K
  MISC_FEATURE: c-term amidation
  MOD_RES (2)..(2): Aminoisobutyric acid
  MOD_RES (10)..(10): Acylated with C14 fatty acid
  MOD_RES (24)..(24): Cys-PEG
HXQGTFTSDKSKYLDEQAAKEFICWLMNT

SEQ ID NO: 536 - protein, 29 aa, Artificial Sequence
  Synthetic peptide
  MISC_FEATURE: Chimera 2 AIB2 K10-C16 Cys24-40K
  MISC_FEATURE: c-term amidation
  MOD_RES (2)..(2): Aminoisobutyric acid
  MOD_RES (10)..(10): Acylated with C16 fatty acid
  MOD_RES (24)..(24): Cys-PEG
HXQGTFTSDKSKYLDEQAAKEFICWLMNT

SEQ ID NO: 537 - protein, 29 aa, Artificial Sequence
  Synthetic peptide
  MISC_FEATURE: Chimera 2 AIB2 K10-C18 Cys24-40K
  MISC_FEATURE: c-term amidation
  MOD_RES (2)..(2): Aminoisobutyric acid
  MOD_RES (10)..(10): Acylated with C18 fatty acid
  MOD_RES (24)..(24): Cys-PEG
HXQGTFTSDKSKYLDEQAAKEFICWLMNT

SEQ ID NO: 538 - protein, 29 aa, Artificial Sequence
  Synthetic peptide
  MISC_FEATURE: Chimera 2 K10-C18 Cys24-40K
  MISC_FEATURE: c-term amidation
  MOD_RES (10)..(10): Acylated with C18 fatty acid
  MOD_RES (24)..(24): Cys-PEG
HSQGTFTSDKSKYLDEQAAKEFICWLMNT

SEQ ID NO: 539 - protein, 29 aa, Artificial Sequence
  Synthetic peptide
  MISC_FEATURE: Glucagon E16 K20 K10-C18 Cys24-40K
  MOD_RES (10)..(10): Acylated with C18 fatty acid
  MOD_RES (24)..(24): Cys-PEG
HSQGTFTSDKSKYLDERRAKDFVCWLMNT

SEQ ID NO: 540 - protein, 29 aa, Artificial Sequence
  Synthetic peptide
  MISC_FEATURE: Glucagon E16 K20 K10-W-C18
  MISC_FEATURE: c-term amidation
  MOD_RES (10)..(10): Covalently bound to Trp residue comprising a C18 fatty acid
HSQGTFTSDKSKYLDERRAKDFVQWLMNT

SEQ ID NO: 541 - protein, 29 aa, Artificial Sequence
  Synthetic peptide
  MISC_FEATURE: Glucagon E16 K20 K10-W-C16 Cys24-40K
  MOD_RES (10)..(10): Covalently bound to Trp residue comprising a C16 fatty acid
  MOD_RES (24)..(24): Cys-PEG
HSQGTFTSDKSKYLDERRAKDFVCWLMNT

SEQ ID NO: 542 - protein, 29 aa, Artificial Sequence
  Synthetic peptide
  MISC_FEATURE: Glucagon E16 K20 K10-C16
  MISC_FEATURE: c-term amidation
  MOD_RES (10)..(10): Covalently bound to C16 fatty acid
HSQGTFTSDKSKYLDERRAKDFVQWLMNT

SEQ ID NO: 543 - protein, 29 aa, Artificial Sequence
  Synthetic peptide
  MISC_FEATURE: Glucagon E16 K20 K10-C16
  MISC_FEATURE: c-term amidation
  MOD_RES (10)..(10): Covalently bound to Trp residue comprising a C16 fatty acid
HSQGTFTSDKSKYLDERRAKDFVQWLMNT

SEQ ID NO: 544 - protein, 29 aa, Artificial Sequence
  Synthetic peptide
  MISC_FEATURE: Glucagon E16 K20 K10-C18
  MISC_FEATURE: c-term amidation
  MOD_RES (10)..(10): Covalently bound to C18 fatty acid
HSQGTFTSDKSKYLDERRAKDFVQWLMNT

SEQ ID NO: 545 - protein, 29 aa, Artificial Sequence
  Synthetic peptide
  MISC_FEATURE: Glucagon E16 K20
  MISC_FEATURE: c-term amidation
HSQGTFTSDYSKYLDERRAKDFVQWLMNT

SEQ ID NO: 546 - protein, 29 aa, Artificial Sequence
  Synthetic peptide
  MISC_FEATURE: Glucagon E16 K20 K10-W-C16 Cys 24-40K
  MISC_FEATURE: c-term amidation
  MOD_RES (10)..(10): Covalently bound to Trp residue comprising C16 fatty acid
  MOD_RES (24)..(24): Cys-PEG
HSQGTFTSDKSKYLDERRAKDFVCWLMNT

SEQ ID NO: 547 - protein, 29 aa, Artificial Sequence
  Synthetic peptide
  MISC_FEATURE: Glucagon E16 K20 K10-C18 Cys24-40K
  MISC_FEATURE: c-term amidation
  MOD_RES (10)..(10): Covalently bound to C18 fatty acid
  MOD_RES (24)..(24): Cys-PEG
HSQGTFTSDKSKYLDERRAKDFVCWLMNT

SEQ ID NO: 548 - protein, 29 aa, Artificial Sequence
  Synthetic peptide
  MISC_FEATURE: Glucagon E16 K20 K10-C18 Cys24-40K
  MISC_FEATURE: c-term amidation
  MOD_RES (10)..(10): Covalently bound to Trp residue comprising a C18 fatty acid
  MOD_RES (24)..(24): Cys-PEG
HSQGTFTSDKSKYLDERRAKDFVCWLMNT

SEQ ID NO: 549 - protein, 29 aa, Artificial Sequence
  Synthetic peptide
  MISC_FEATURE: Glucagon E16 K20 K10-C16 amide
  MISC_FEATURE: c-term amidation
  MOD_RES (10)..(10): Covalently bound to Glu residue comprising a C16 fatty acid
  MOD_RES (24)..(24): Cys-PEG
HSQGTFTSDKSKYLDERRAQDFVCWLMNT

SEQ ID NO: 550 - protein, 28 aa, Artificial Sequence
  Synthetic peptide
  MISC_FEATURE: Chimera 2 truncated by one amino acid
HSQGTFTSDYSKYLDEQAAKEFIAWLMN

SEQ ID NO: 551 - protein, 27 aa, Artificial Sequence
  Synthetic peptide
  MISC_FEATURE: Chimera 2 truncated by two amino acids
HSQGTFTSDYSKYLDEQAAKEFIAWLM

SEQ ID NO: 552 - protein, 28 aa, Artificial Sequence
  Synthetic peptide
  MISC_FEATURE: aa 1-28, E16 K20 C-terminal amide
  MISC_FEATURE: c-term amidation
HSQGTFTSDYSKYLDERRAKDFVQWLMN

SEQ ID NO: 553 - protein, 27 aa, Artificial Sequence
  Synthetic peptide
  MISC_FEATURE: aa 1-27 E16 K20 C-terminal amide
  MISC_FEATURE: c-term amidation
HSQGTFTSDYSKYLDERRAKDFVQWKM

SEQ ID NO: 554 - protein, 29 aa, Artificial Sequence
  Synthetic peptide
  MISC_FEATURE: c-term amidation
  MOD_RES (27)..(27): Norleucine
HSEGTFTSDYSKYLDEQAAKEFIAWLXNT

SEQ ID NO: 555 - protein, 39 aa, Artificial Sequence
  Synthetic peptide
  MISC_FEATURE (16)..(20): Lactam bridging side chains at positions 16 and 20
YSQGTFTSDYSKYLDEQAAKEFVNWLMNGGPSSGAPPPS

SEQ ID NO: 556 - protein, 29 aa, Artificial Sequence
  Synthetic peptide
  MISC_FEATURE: Chimera 2 with AIB at 16
  MISC_FEATURE: c-term amidation
  MOD_RES (16)..(16): Aminoisobutyric acid
HSQGTFTSDYSKYLDXQAAKEFIAWLMNT

SEQ ID NO: 557 - protein, 29 aa, Artificial Sequence
  Synthetic peptide
  MISC_FEATURE: c-term amidation
  MOD_RES (2)..(2): Aminoisobutyric acid
  MOD_RES (16)..(16): Aminoisobutyric acid
HXQGTFTSDYSKYLDXRRAQDFVQWLMNT

SEQ ID NO: 558 - protein, 29 aa, Artificial Sequence
  Synthetic peptide
  MISC_FEATURE: c-term amidation
  MOD_RES (2)..(2): Aminoisobutyric acid
  MISC_FEATURE (10)..(10): Covalently bound to Trp residue comprising a C16 fatty acid
  MOD_RES (16)..(16): Aminoisobutyric acid
  MOD_RES (24)..(24): Cys-PEG
HXQGTFTSDKSKYLDXRRAQDFVCWLMNT

SEQ ID NO: 559 - protein, 29 aa, Artificial Sequence
  Synthetic peptide
  MISC_FEATURE: c-term amidation
  MOD_RES (2)..(2): Aminoisobutric Acid
  MISC_FEATURE (10)..(10): Covalently bound to Trp residue comprising a C16 fatty acid
  MOD_RES (16)..(16): Aminoisobutric Acid
HXQGTFTSDKSKYLDXRRAQDFVCWLMNT

SEQ ID NO: 560 - protein, 29 aa, Artificial Sequence
  Synthetic peptide
  MISC_FEATURE: c-term amidation
  MOD_RES (2)..(2): Aminoisobutyric acid
  MISC_FEATURE (10)..(10): Covalently bound to Trp residue comprising a C16 fatty acid
  MOD_RES (16)..(16): Aminoisobutyric acid
  MOD_RES (20)..(20): Aminoisobutyric acid
  MOD_RES (24)..(24): Cys-PEG
HXQGTFTSDKSKYLDXRRAXDFVCWLMNT

SEQ ID NO: 561 - protein, 29 aa, Artificial Sequence
  Synthetic peptide
  MISC_FEATURE: c-term amidation
  MOD_RES (2)..(2): Aminoisobutyric acid
  MISC_FEATURE (10)..(10): Covalently bound to Trp residue comprising a C16 fatty acid
  MOD_RES (16)..(16): Aminoisobutyric acid
  MOD_RES (20)..(20): Aminoisobutyric acid
HXQGTFTSDKSKYLDXRRAXDFVCWLMNT

SEQ ID NO: 562 - protein, 29 aa, Artificial Sequence
  Synthetic peptide
  MISC_FEATURE: c-term amidation
  MOD_RES (2)..(2): Aminoisobutyric acid
  MOD_RES (16)..(16): Aminoisobutyric acid
HXQGTFTSDKSKYLDXRRAQDFVQWLMNT

SEQ ID NO: 563 - protein, 29 aa, Artificial Sequence
  Synthetic peptide
  MISC_FEATURE: c-term amidation
  MOD_RES (2)..(2): Aminoisobutyric Acid
  MOD_RES (10)..(10): Acylated with a C16 fatty acyl group
  MOD_RES (16)..(16): Aminoisobutyric Acid
HXQGTFTSDKSKYLDXRRAQDFVQWLMNT

SEQ ID NO: 564 - protein, 29 aa, Artificial Sequence
  Synthetic peptide
  MISC_FEATURE: c-term amidation
  MOD_RES (2)..(2): Aminoisobutyric Acid
  MOD_RES (10)..(10): Acylated with a C16 fatty acyl group via Ala-Ala spacer
  MOD_RES (16)..(16): Aminoisobutyric Acid
HXQGTFTSDKSKYLDXRRAQDFVQWLMNT

SEQ ID NO: 565 - protein, 29 aa, Artificial Sequence
  Synthetic peptide
  MISC_FEATURE: c-term amidation
  MOD_RES (2)..(2): Aminoisobutryic Acid
  MOD_RES (10)..(10): Acylated with a C16 fatty acyl group via gamma-Glu-gamma-Glu spacer
  MOD_RES (16)..(16): Aminoisobutryic Acid
HXQGTFTSDKSKYLDXRRAQDFVQWLMNT

SEQ ID NO: 566 - protein, 29 aa, Artificial Sequence
  Synthetic peptide
  MISC_FEATURE: c-term amidation
  MOD_RES (2)..(2): Aminoisobutryic Acid
  MOD_RES (10)..(10): Acylated with a C16 fatty acyl group via beta-Ala-beta-Ala spacer
  MOD_RES (16)..(16): Aminoisobutryic Acid
HXQGTFTSDKSKYLDXRRAQDFVQWLMNT

SEQ ID NO: 567 - protein, 29 aa, Artificial Sequence
  Synthetic peptide
  MISC_FEATURE: c-term amidation
  MOD_RES (2)..(2): Aminoisobutryic Acid
  MOD_RES (10)..(10): Acylated with a C16 fatty acyl group via 6-aminohexanoic acid spacer
  MOD_RES (16)..(16): Aminoisobutryic Acid
HXQGTFTSDKSKYLDXRRAQDFVQWLMNT

SEQ ID NO: 568 - protein, 29 aa, Artificial Sequence
  Synthetic peptide
  MISC_FEATURE: c-term amidation
  MOD_RES (2)..(2): Aminoisobutryic Acid
  MOD_RES (10)..(10): Acylated with a C16 fatty acyl group via Leu-Leu spacer
  MOD_RES (16)..(16): Aminoisobutryic Acid
HXQGTFTSDKSKYLDXRRAQDFVQWLMNT

SEQ ID NO: 569 - protein, 29 aa, Artificial Sequence
  Synthetic peptide
  MISC_FEATURE: c-term amidation
  MOD_RES (2)..(2): Aminoisobutryic Acid
  MOD_RES (10)..(10): Acylated with a C16 fatty acyl group via Pro-Pro spacer
  MOD_RES (16)..(16): Aminoisobutryic Acid
HXQGTFTSDKSKYLDXRRAQDFVQWLMNT

SEQ ID NO: 570 - protein, 29 aa, Artificial Sequence
  Synthetic peptide
  MISC_FEATURE: c-term amidation
  MOD_RES (2)..(2): Aminoisobutyric Acid
  MOD_RES (10)..(10): Acylated with a C14 fatty acyl group
  MOD_RES (16)..(16): Aminoisobutyric Acid
  MOD_RES (24)..(24): Pegylated
HXQGTFTSDKSKYLDXRRAQDFVCWLMNT

SEQ ID NO: 571 - protein, 29 aa, Artificial Sequence
  Synthetic peptide
  MISC_FEATURE: c-term amidation
  MOD_RES (2)..(2): Aminoisobutyric Acid
  MOD_RES (10)..(10): Acylated with a C14 fatty acyl group via gamma-Glu-gamma-Glu spacer
  MOD_RES (16)..(16): Aminoisobutyric Acid
  MOD_RES (24)..(24): Pegylated
HXQGTFTSDKSKYLDXRRAQDFVCWLMNT

SEQ ID NO: 572 - protein, 29 aa, Artificial Sequence
  Synthetic peptide
  MISC_FEATURE: c-term amidation
  MOD_RES (2)..(2): Aminoisobutryic Acid
  MOD_RES (10)..(10): Acylated with a C14 fatty acyl group via gamma-Glu-gamma-Glu spacer
  MOD_RES (16)..(16): Aminoisobutryic Acid
HXQGTFTSDKSKYLDXRRAQDFVQWLMNT

SEQ ID NO: 573 - protein, 29 aa, Artificial Sequence
  Synthetic peptide
  MISC_FEATURE: c-term amidation
  MOD_RES (2)..(2): Aminoisobutryic Acid
  MOD_RES (10)..(10): Acylated with a C14 fatty acyl group via Ala-Ala spacer
  MOD_RES (16)..(16): Aminoisobutryic Acid
  MOD_RES (24)..(24): Pegylated
HXQGTFTSDKSKYLDXRRAQDFVCWLMNT

SEQ ID NO: 574 - protein, 29 aa, Artificial Sequence
  Synthetic peptide
  MISC_FEATURE: c-term amidation
  MOD_RES (2)..(2): Aminoisobutryic Acid
  MOD_RES (10)..(10): Acylated with a C14 fatty acyl group via Ala-Ala spacer
  MOD_RES (16)..(16): Aminoisobutryic Acid
HXQGTFTSDKSKYLDXRRAQDFVQWLMNT

SEQ ID NO: 575 - protein, 29 aa, Artificial Sequence
  Synthetic peptide
  MISC_FEATURE: c-term amidation
  MOD_RES (2)..(2): Aminoisobutryic acid
  MOD_RES (10)..(10): Acylated with a C16 fatty acyl group via Ala-Ala spacer
  MOD_RES (16)..(16): Aminoisobutryic acid
  MOD_RES (24)..(24): Pegylated
HXQGTFTSDKSKYLDXRRAQDFVCWLMNT

SEQ ID NO: 576 - protein, 29 aa, Artificial Sequence
  Synthetic peptide
  MISC_FEATURE: c-term amidation
  MOD_RES (2)..(2): Aminoisobutryic Acid
  MOD_RES (10)..(10): Acylated with a C16 fatty acyl group via gamma-Glu-gamma-Glu spacer
  MOD_RES (16)..(16): Aminoisobutryic Acid
  MOD_RES (24)..(24): Pegylated
HXQGTFTSDKSKYLDXRRAQDFVCWLMNT

SEQ ID NO: 577 - protein, 29 aa, Artificial Sequence
  Synthetic peptide
  MISC_FEATURE: c-term amidation
  MOD_RES (10)..(10): Acylated with a C16 fatty acyl group
HSQGTFTSDKSKYLDSRRAQDFVQWLMNT

SEQ ID NO: 578 - protein, 29 aa, Artificial Sequence
  Synthetic peptide
  MISC_FEATURE: c-term amidation
  MOD_RES (10)..(10): Acylated with a C16 fatty acyl group via gamma-Glu-gamma-Glu spacer
HSQGTFTSDKSKYLDSRRAQDFVQWLMNT

SEQ ID NO: 579 - protein, 29 aa, Artificial Sequence
  Synthetic peptide
  MISC_FEATURE: AA-C16 Glucagon Amide
  MISC_FEATURE: c-term amidation
  MOD_RES (10)..(10): Acylated with a C16 fatty acyl group via Ala-Ala spacer
HSQGTFTSDKSKYLDSRRAQDFVQWLMNT

SEQ ID NO: 580 - protein, 29 aa, Artificial Sequence
  Synthetic peptide
  MISC_FEATURE: Chimera 2, AIB2, Lys10, Cys24-PEG
  MISC_FEATURE: c-term amidation
  MOD_RES (2)..(2): Aminoisobutryic Acid
  MOD_RES (24)..(24): Pegylated
HXQGTFTSDKSKYLDEQAAKEFICWLMNT

SEQ ID NO: 581 - protein, 30 aa, Artificial Sequence
  Synthetic peptide
  MISC_FEATURE: Peptide dS2E16K20K30-C14 Gluc Amide
  MISC_FEATURE: c-term amidation
  MOD_RES (2)..(2): Xaa is d-Ser
  MOD_RES (30)..(30): Acylated with a C14 fatty acyl group
HXQGTFTSDYSKYLDERRAKDFVQWLMNTK

SEQ ID NO: 582 - protein, 29 aa, Artificial Sequence
  Synthetic peptide
  MISC_FEATURE: Peptide dS2K10(C14)E16K20-Gluc Amide
  MISC_FEATURE: c-term amidation
  MOD_RES (2)..(2): Xaa is d-Ser
  MOD_RES (10)..(10): Acylated with a C14 fatty acyl group
HXQGTFTSDKSKYLDERRAKDFVQWLMNT

SEQ ID NO: 583 - protein, 30 aa, Artificial Sequence; identical to SEQ ID NO: 581
  Synthetic peptide
  MISC_FEATURE: Peptide dS2E16K20K30-C16 Gluc Amide
  MISC_FEATURE: c-term amidation
  MOD_RES (2)..(2): Xaa is d-Ser
  MOD_RES (30)..(30): Acylated with a C16 fatty acyl group

SEQ ID NO: 584 - protein, 29 aa, Artificial Sequence
  Synthetic peptide
  MISC_FEATURE: Peptide dS2K10(C16)E16K20-Gluc Amide
  MISC_FEATURE: c-term amidation
  MOD_RES (2)..(2): Xaa is d-Ser
  MOD_RES (10)..(10): Acylated with a C16 fatty acyl group
HXQGTFTSDKSKYLDERRAKDFVQWLMNT

SEQ ID NO: 585 - protein, 29 aa, Artificial Sequence
  Synthetic peptide
  MISC_FEATURE: Peptide Chimera 2-AIB2-K10-acylated
  MISC_FEATURE: c-term amidation
  MOD_RES (2)..(2): Aminoisobutryic Acid
  MOD_RES (10)..(10): Acylated with a C18 fatty acyl group
  MOD_RES (24)..(24): Pegylated
HXQGTFTSDKSKYLDEQAAKEFICWLMNT

SEQ ID NO: 586 - protein, 30 aa, Artificial Sequence
  Synthetic peptide
  MISC_FEATURE: Peptide Chimera 2-AIB2-K30-acylated
  MISC_FEATURE: c-term amidation
  MOD_RES (2)..(2): Aminoisobutryic Acid
  MOD_RES (24)..(24): Pegylated
  MOD_RES (30)..(30): Acylated with a C18 fatty acyl group
HXQGTFTSDYSKYLDEQAAKEFICWLMNTK

SEQ ID NO: 587 - protein, 29 aa, Artificial Sequence
  Synthetic peptide
  MISC_FEATURE: c-term amidation
  MOD_RES (1)..(1): DMIA
XSQGTFTSDYSKYLDERRAKDFVCWLMNT

SEQ ID NO: 588 - protein, 29 aa, Artificial Sequence
  Synthetic peptide
  MISC_FEATURE: c-term amidation
  MOD_RES (1)..(1): DMIA
  MOD_RES (16)..(20): Lactam ring between side chains of amino acids at positions 16 and 20
XSQGTFTSDYSKYLDERRAKDFVCWLMNT

SEQ ID NO: 589 - protein, 29 aa, Artificial Sequence
  Synthetic peptide
  MISC_FEATURE: c-term amidation
  MOD_RES (2)..(2): Aminoisobutryic Acid
HXEGTFTSDYSKYLDEQAAKEFICWLMNT

SEQ ID NO: 590 - protein, 29 aa, Artificial Sequence
  Synthetic peptide
  MISC_FEATURE: c-term amidation
  MOD_RES (2)..(2): Aminoisobutryic Acid
  MOD_RES (24)..(24): Pegylated
HXEGTFTSDYSKYLDEQAAKEFICWLMNT

SEQ ID NO: 591 - protein, 29 aa, Artificial Sequence
  Synthetic peptide
  MOD_RES (3)..(3): Xaa is a Glutamine analog
  MOD_RES (27)..(27): Xaa is Norleucine
HSXGTFTSDYSKYLDTRRAAEFVAWLXDE

SEQ ID NO: 592 - protein, 29 aa, Artificial Sequence
  Synthetic peptide
  MOD_RES (3)..(3): Xaa is a Glutamine analog
  MOD_RES (16)..(16): Xaa is Aib
HSXGTFTSDYSKYLDXRRAADFVAWLMDE

SEQ ID NO: 593 - protein, 29 aa, Artificial Sequence
  Synthetic peptide
  MOD_RES (27)..(27): Xaa is Norleucine
HSQGTFTSDYSKYLDTRRAAEFVAWLXDE

SEQ ID NO: 594 - protein, 29 aa, Artificial Sequence
  Synthetic peptide
  MOD_RES (3)..(3): Xaa is Acetamidomethyl-cysteine
  MOD_RES (27)..(27): Xaa is Norleucine
HSXGTFTSDYSKYLDTRRAAEFVAWLXDE

SEQ ID NO: 595 - protein, 29 aa, Artificial Sequence
  Synthetic peptide
  MOD_RES (3)..(3): Xaa is Acetyldiaminobutanoic acid
  MOD_RES (27)..(27): Xaa is Norleucine
HSXGTFTSDYSKYLDTRRAAEFVAWLXDE

SEQ ID NO: 596 - protein, 29 aa, Artificial Sequence
  Synthetic peptide
  MOD_RES (3)..(3): Xaa is carbamoyldiaminopropanoic acid
  MOD_RES (27)..(27): Xaa is Norleucine
HSXGTFTSDYSKYLDTRRAAEFVAWLXDE

SEQ ID NO: 597 - protein, 29 aa, Artificial Sequence
  Synthetic peptide
  MOD_RES (3)..(3): Xaa is Methylglutamine
  MOD_RES (27)..(27): Xaa is Norleucine
HSXGTFTSDYSKYLDTRRAAEFVAWLXDE

SEQ ID NO: 598 - protein, 29 aa, Artificial Sequence
  Synthetic peptide
  MOD_RES (3)..(3): Xaa is Methionine sulfoxide
  MOD_RES (27)..(27): Xaa is Norleucine
HSXGTFTSDYSKYLDTRRAAEFVAWLXDE

SEQ ID NO: 599 - protein, 29 aa, Artificial Sequence
  Synthetic peptide
  MOD_RES (3)..(3): Acetylornithine
  MOD_RES (27)..(27): Xaa is Norleucine
HSXGTFTSDYSKYLDTRRAAEFVAWLXDE

SEQ ID NO: 600 - protein, 29 aa, Artificial Sequence
  Synthetic peptide
  MOD_RES (16)..(16): Xaa is Aminoisobutryic Acid
HSQGTFTSDYSKYLDXRRAADFVAWLMDE

SEQ ID NO: 601 - protein, 29 aa, Artificial Sequence
  Synthetic peptide
  MOD_RES (3)..(3): Xaa is Acetyldiaminobutanoic acid
  MOD_RES (16)..(16): Xaa is Aminoisobutyric Acid
HSXGTFTSDYSKYLDXRRAADFVAWLMDE

SEQ ID NO: 602 - protein, 29 aa, Artificial Sequence
  Synthetic peptide
  MOD_RES (3)..(3): Xaa is Methylglutamine
  MOD_RES (16)..(16): Xaa is Aminoisobutyric Acid
HSXGTFTSDYSKYLDXRRAADFVAWLMDE

SEQ ID NO: 603 - protein, 29 aa, Artificial Sequence
  Synthetic peptide
  MOD_RES (3)..(3): Xaa is Acetyldiaminobutanoic acid
  MOD_RES (16)..(16): Xaa is Aminoisobutryic Acid
HSXGTFTSDYSKYLDXRRAADFVAWLLDE

SEQ ID NO: 604 - protein, 39 aa, Artificial Sequence
  Synthetic peptide
  MISC_FEATURE: c-term amidation
  MOD_RES (3)..(3): Xaa is Acetyldiaminobutanoic acid
  MOD_RES (16)..(16): Xaa is Aminoisobutyric Acid
HSXGTFTSDYSKYLDXRRAADFVAWLLDTGPSSGAPPPS

SEQ ID NO: 605 - protein, 29 aa, Artificial Sequence
  Synthetic peptide
  MOD_RES (3)..(3): Xaa is Acetyldiaminobutanoic acid
  MOD_RES (16)..(16): Xaa is Aminoisobutryic Acid
HSXGTFTSDYSKYLDXRRASDFVSWLLDE

SEQ ID NO: 606 - protein, 29 aa, Artificial Sequence
  Synthetic peptide
  MOD_RES (3)..(3): Xaa is Acetyldiaminobutanoic acid
  MOD_RES (16)..(16): Xaa is Aminoisobutryic Acid
HSXGTFTSDYSKYLDXRRATDFVTWLLDE

SEQ ID NO: 607 - protein, 29 aa, Artificial Sequence
  Synthetic peptide
  MISC_FEATURE: c-term amidation
  MOD_RES (1)..(1): Xaa is Dmia
  MOD_RES (10)..(10): Covalently bound to a C14 fatty acyl group
  MOD_RES (16)..(20): Lactam ring between side chains of amino acids at positions 16 and 20
XSQGTFTSDKSKYLDERRAKDFVQWLMNT

SEQ ID NO: 608 - protein, 29 aa, Artificial Sequence
  Synthetic peptide
  MISC_FEATURE: c-term amidation
  MOD_RES (1)..(1): DMIA
  MOD_RES (10)..(10): Covalently bound to C16 fatty acyl group
  MOD_RES (16)..(20): Lactam ring between side chains of amino acids at positions 16 and 20
XSQGTFTSDKSKYLDERRAKDFVQWLMNT

SEQ ID NO: 609 - protein, 29 aa, Artificial Sequence
  Synthetic peptide
  MISC_FEATURE: c-term amidation
  MOD_RES (1)..(1): DMIA
  MOD_RES (10)..(10): Covalently bound to C18 fatty acyl group
  MOD_RES (16)..(20): Lactam ring between side chains of amino acids at positions 16 and 20
XSQGTFTSDKSKYLDERRAKDFVQWLMNT

SEQ ID NO: 610 - protein, 29 aa, Artificial Sequence
  Synthetic peptide
  MISC_FEATURE: c-term amidation
  MOD_RES (2)..(2): Aminoisobutryic Acid
  MOD_RES (10)..(10): Covalently bound to C14 fatty acyl group
  MOD_RES (16)..(16): Aminoisobutryic Acid
HXQGTFTSDKSKYLDXRRAQDFVQWLMNT

SEQ ID NO: 611 - protein, 29 aa, Artificial Sequence
  Synthetic peptide
  MISC_FEATURE: c-term amidation
  MOD_RES (2)..(2): Aminoisobutryic Acid
  MOD_RES (10)..(10): Covalently bound to C16 fatty acyl group
  MOD_RES (16)..(16): Aminoisobutryic Acid
HXQGTFTSDKSKYLDXRRAQDFVQWLMNT

SEQ ID NO: 612 - protein, 29 aa, Artificial Sequence
  Synthetic peptide
  MISC_FEATURE: c-term amidation
  MOD_RES (2)..(2): Aminoisobutryic Acid
  MOD_RES (10)..(10): Covalently bound to C18 fatty acyl group
  MOD_RES (16)..(16): Aminoisobutryic Acid
HXQGTFTSDKSKYLDXRRAQDFVQWLMNT

SEQ ID NO: 613 - protein, 29 aa, Artificial Sequence
  Synthetic peptide
  MISC_FEATURE: c-term amidation
  MOD_RES (2)..(2): Xaa is d-Ser
  MOD_RES (10)..(10): Covalently bound to C14 fatty acyl group
HXQGTFTSDKSKYLDERRAKDFVQWLMNT

SEQ ID NO: 614 - protein, 29 aa, Artificial Sequence
  Synthetic peptide
  MISC_FEATURE: c-term amidation
  MOD_RES (2)..(2): Xaa is d-Ser
  MOD_RES (10)..(10): Covalently bound to C16 fatty acyl group
HXQGTFTSDKSKYLDERRAKDFVQWLMNT

SEQ ID NO: 615 - protein, 29 aa, Artificial Sequence
  Synthetic peptide
  MISC_FEATURE: c-term amidation
  MOD_RES (2)..(2): Xaa is d-Ser
  MOD_RES (10)..(10): Covalently bound to a C18 fatty acyl group
HXQGTFTSDKSKYLDERRAKDFVQWLMNT

SEQ ID NO: 616 - protein, 29 aa, Artificial Sequence
  Synthetic peptide
  MISC_FEATURE: c-term amidation
  MOD_RES (2)..(2): Aminoisobutyric Acid
  MOD_RES (10)..(10): Covalently bound to a C14 fatty acyl group
  MOD_RES (16)..(16): Aminoisobutyric Acid
HXQGTFTSDKSKYLDXRRAQDFVCWLMNT

SEQ ID NO: 617 - protein, 29 aa, Artificial Sequence
  Synthetic peptide
  MISC_FEATURE: c-term amidation
  MOD_RES (2)..(2): Aminoisobutryic Acid
  MOD_RES (10)..(10): Covalently bound to C14 fatty acyl group via gamma-Glu-gamma-Glu spacer
  MOD_RES (16)..(16): Aminoisobutryic Acid
HXQGTFTSDKSKYLDXRRAQDFVCWLMNT

SEQ ID NO: 618 - protein, 29 aa, Artificial Sequence
  Synthetic peptide
  MISC_FEATURE: c-term amidation
  MOD_RES (2)..(2): Aminoisobutryic Acid
  MOD_RES (10)..(10): Covalently bound to C14 fatty acyl group via Ala-Ala spacer
  MOD_RES (16)..(16): Aminoisobutryic Acid
HXQGTFTSDKSKYLDXRRAQDFVCWLMNT

SEQ ID NO: 619 - protein, 29 aa, Artificial Sequence
  Synthetic peptide
  MISC_FEATURE: c-term amidation
  MOD_RES (2)..(2): Aminoisobutyric Acid
  MOD_RES (10)..(10): Covalently bound to C16 fatty acyl group via di peptide spacer
  MOD_RES (16)..(16): Aminoisobutyric Acid
HXQGTFTSDKSKYLDXRRAQDFVCWLMNT

SEQ ID NO: 620 - protein, 29 aa, Artificial Sequence
  Synthetic peptide
  MISC_FEATURE: c-term amidation
  MOD_RES (2)..(2): Aminoisobutyric Acid
  MOD_RES (10)..(10): Covelently bound to C16 fatty acyl group via Ala-Ala spacer
  MOD_RES (16)..(16): Aminoisobutyric Acid
HXQGTFTSDKSKYLDXRRAQDFVCWLMNT

SEQ ID NO: 621 - protein, 29 aa, Artificial Sequence
  Synthetic peptide
  MISC_FEATURE: c-term amidation
  MOD_RES (2)..(2): Aminoisobutyric Acid
  MOD_RES (10)..(10): Covalently bound to C16 fatty acyl group
  MOD_RES (16)..(16): Aminoisobutyric Acid
HXQGTFTSDKSKYLDXRRAQDFVCWLMNT

SEQ ID NO: 622 - protein, 30 aa, Artificial Sequence
  Synthetic peptide
  MISC_FEATURE: c-term amidation
  MOD_RES (2)..(2): Aminoisobutyric Acid
  MOD_RES (10)..(10): Covalently bound to C16 fatty acyl group
  MOD_RES (16)..(16): Aminoisobutyric Acid
HXQGTFTSDKSKYLDXRRAQDFVCWLMNTK

SEQ ID NO: 623 - protein, 29 aa, Artificial Sequence
  Synthetic peptide
  MISC_FEATURE: beta-Ala-beta-Ala - C16 Glucagon Amide
  MISC_FEATURE: c-term amidation
  MISC_FEATURE (10)..(10): Acylated with a C16 fatty acyl group via beta-Ala-beta-Ala spacer
HSQGTFTSDKSKYLDSRRAQDFVQWLMNT

SEQ ID NO: 624 - protein, 29 aa, Artificial Sequence
  Synthetic peptide
  MISC_FEATURE: Chimera-2 Aib2C24Mal40KPEG
  MOD_RES (2)..(2): Xaa is Aib
  MOD_RES (24)..(24): Covalently bound to 40kDa PEG via thioether made by reaction of peptide with a maleimide-activated PEG
  MOD_RES (29)..(29): AMIDATION
HXQGTFTSDYSKYLDEQAAKEFICWLMNT

SEQ ID NO: 625 - protein, 29 aa, Artificial Sequence
  Synthetic peptide
  MISC_FEATURE: Chimera-2 Aib2E16K20lactamC24Mal40KPEG
  MOD_RES (2)..(2): Xaa is Aib
  MISC_FEATURE (16)..(20): Lactam ring between side chains of the amino acids at positions 16 and 20
  MOD_RES (24)..(24): Covalently bound to 40kDa PEG via thioether made by reaction of peptide with a maleimide-activated PEG
  MOD_RES (29)..(29): AMIDATION
HXQGTFTSDYSKYLDEQAAKEFICWLMNT

SEQ ID NO: 626 - protein, 29 aa, Artificial Sequence
  Synthetic peptide
  MISC_FEATURE: Glucagon Aib2E16K20lactamC24amideMal40KPEG
  MOD_RES (2)..(2): Xaa is Aib
  MISC_FEATURE (16)..(20): Lactam ring between side chains of amino acids at positions 16 and 20
  MOD_RES (24)..(24): Covalently bound to 40kDa PEG via thioether made by reaction of peptide with a maleimide-activated PEG
  MOD_RES (29)..(29): AMIDATION
HXQGTFTSDYSKYLDERRAKDFVCWLMNT

SEQ ID NO: 627 - skipped

SEQ ID NO: 628 - protein, 29 aa, Artificial Sequence
  Synthetic peptide
  MISC_FEATURE: Glucagon Dmia1E16K20lactamC24Mal40KPEG
  MOD_RES (1)..(1): Xaa is Dmia
  MISC_FEATURE (16)..(20): Lactam ring between side chains of amino acids at positions 16 and 20
  MOD_RES (24)..(24): Covalently bound to 40kDa PEG via thioether made by reaction of peptide with a maleimide-activated PEG
  MOD_RES (29)..(29): AMIDATION
XSQGTFTSDYSKYLDERRAKDFVCWLMNT

SEQ ID NO: 629 - protein, 29 aa, Artificial Sequence
  Synthetic peptide
  MISC_FEATURE: Glucagon Dmia1E16K20lactamC24Mal40KPEG
  MOD_RES (1)..(1): Xaa is Dmia
  MISC_FEATURE (16)..(20): Lactam ring between side chains of amino acids at positions 16 and 20
  MISC_FEATURE (24)..(24): Covalently bound to 40kDa PEG via thioether made by reaction of peptide with a maleimide-activated PEG
XSQGTFTSDYSKYLDERRAKDFVCWLMNT

SEQ ID NO: 630 - protein, 29 aa, Artificial Sequence
  Synthetic peptide
  MISC_FEATURE: Glucagon Dmia1E16K20lactamC24thioether40KPEG
  MOD_RES (1)..(1): Xaa is Dmia
  MISC_FEATURE (16)..(20): Lactam ring between side chains of amino acids at position 16 and 20
  MOD_RES (24)..(24): Covalently bound to 40kDa PEG via thioether made by reaction of peptide with haloacetyl-activated PEG
  MOD_RES (29)..(29): AMIDATION
XSQGTFTSDYSKYLDERRAKDFVCWLMNT

SEQ ID NO: 631 - protein, 29 aa, Artificial Sequence
  Synthetic peptide
  MISC_FEATURE: Chimera2 Aib2E3C24-Thioether40K PEG
  MOD_RES (2)..(2): Xaa is Aib
  MOD_RES (24)..(24): Covalently bound to 40kDa PEG via thioether made by reaction of peptide with haloacetyl-activated PEG
  MOD_RES (29)..(29): AMIDATION
HXEGTFTSDYSKYLDEQAAKEFICWLMNT

SEQ ID NO: 632 - protein, 29 aa, Artificial Sequence
  Synthetic peptide
  MOD_RES (1)..(1): Xaa is Dmia
  MOD_RES (24)..(24): Covalently bound to 40kDa PEG
  MOD_RES (29)..(29): AMIDATION
XSEGTFTSDYSKYLEERRAKDFVCWLMNT

SEQ ID NO: 633 - protein, 29 aa, Artificial Sequence
  Synthetic peptide
  MISC_FEATURE: Glucagon Aib2Aib16C24K10(rErE-C16) C24PEG40K amide
  MOD_RES (2)..(2): Xaa is Aib
  MOD_RES (10)..(10): Covalently bound to C14 fatty acyl group via gamma-Glu-gamma-Glu spacer
  MOD_RES (16)..(16): Xaa is Aib
  MOD_RES (24)..(24): Covalently bound to 40kDa PEG via thioether made by reaction of peptide with haloacetyl-activated PEG
  MOD_RES (29)..(29): AMIDATION
HXQGTFTSDKSKYLDXRRAQDFVCWLMNT

SEQ ID NO: 634 - protein, 29 aa, Artificial Sequence
  Synthetic peptide
  MISC_FEATURE: Glucagon Aib2Aib16K10(AA-C14)C24PEG40K TE amide
  MOD_RES (2)..(2): Xaa is Aib
  MOD_RES (10)..(10): Covalently bound to C14 fatty acyl group via Ala-Ala spacer
  MOD_RES (16)..(16): Xaa is Aib
  MOD_RES (24)..(24): Covalently bound to 40kDa PEG via thioether made by reaction of peptide with haloacetyl-activated PEG
  MOD_RES (29)..(29): AMIDATION
HXQGTFTSDKSKYLDXRRAQDFVCWLMNT

SEQ ID NO: 635 - protein, 29 aa, Artificial Sequence
  Synthetic peptide
  MISC_FEATURE: Glucagon Aib2Aib16K10(AA-C16) amide
  MOD_RES (2)..(2): Xaa is Aib
  MOD_RES (10)..(10): Covalently bound to C16 fatty acyl group via Ala-Ala spacer
  MOD_RES (16)..(16): Xaa is Aib
  MOD_RES (29)..(29): AMIDATION
HXQGTFTSDKSKYLDXRRAQDFVQWLMNT

SEQ ID NO: 636 - protein, 29 aa, Artificial Sequence
  Synthetic peptide
  MISC_FEATURE: Glucagon Aib2Aib16K10(rErE-C16) amide
  MOD_RES (2)..(2): Xaa is Aib
  MOD_RES (10)..(10): Covalently bound to C16 fatty acyl group via gamma-Glu-gamma-Glu spacer
  MOD_RES (16)..(16): Xaa is Aib
  MOD_RES (29)..(29): AMIDATION
HXQGTFTSDKSKYLDXRRAQDFVQWLMNT

SEQ ID NO: 637 - protein, 29 aa, Artificial Sequence
  Synthetic peptide
  MOD_RES (2)..(2): Xaa is Aib
  MOD_RES (16)..(16): Xaa is Aib
  MOD_RES (29)..(29): AMIDATION
HXQGTFTSDYSKYLDXRRAQDFVQWLMNT

SEQ ID NO: 638 - DNA, 20 bp, Artificial Sequence
  Synthetic primer
caaggtccagggaggttgtg

SEQ ID NO: 639 - DNA, 24 bp, Artificial Sequence
  Synthetic primer
ccaaaggtaagctgtccataagga

SEQ ID NO: 640 - DNA, 22 bp, Artificial Sequence
  Synthetic primer
ctctcccaagagtcacatgtcc

SEQ ID NO: 641 - DNA, 22 bp, Artificial Sequence
  Synthetic primer
caataactcggtcccctacaac

SEQ ID NO: 642 - protein, 29 aa, Artificial Sequence
  Synthetic peptide
HSQGTFTSDYSKYLDSRRAQDFVQWLMDT

SEQ ID NO: 643 - protein, 29 aa, Artificial Sequence
  Synthetic peptide
  MISC_FEATURE: c-term amidation
  MOD_RES (2)..(2): Xaa is d-Ser
  MOD_RES (10)..(10): Acylated with a C16 fatty acyl group via gamma-Glu spacer
HXQGTFTSDKSKYLDEQAAKEFIAWLMNT

SEQ ID NO: 644 - protein, 29 aa, Artificial Sequence
  Synthetic peptide
  MISC_FEATURE: c-term amidation
  MOD_RES (2)..(2): Xaa is d-Ser
  MOD_RES (10)..(10): Acylated with a C16 fatty acyl group via gamma-Glu-gamma-Glu spacer
HXQGTFTSDKSKYLDEQAAKEFIAWLMNT

SEQ ID NO: 645 - protein, 29 aa, Artificial Sequence
  Synthetic peptide
  MISC_FEATURE: c-term amidation
  MOD_RES (2)..(2): Xaa is Aib
  MOD_RES (10)..(10): Acylated with a C16 fatty acyl group via gamma-Glu spacer
HXQGTFTSDKSKYLDEQAAKEFIAWLMNT

SEQ ID NO: 646 - protein, 29 aa, Artificial Sequence
  Synthetic peptide
  MISC_FEATURE: c-term amidation
  MOD_RES (2)..(2): Xaa is Aib
  MOD_RES (10)..(10): Acylated with a C16 fatty acyl group via gamma-Glu-gamma-Glu spacer
HXQGTFTSDKSKYLDEQAAKEFIAWLMNT

SEQ ID NO: 647 - protein, 29 aa, Artificial Sequence
  Synthetic peptide
  MISC_FEATURE: c-term amidation
  MOD_RES (2)..(2): Xaa is Aib
  MOD_RES (10)..(10): Acylated with a C16 fatty acyl group
HXEGTFTSDKSKYLDEQAAKEFIAWLMNT

SEQ ID NO: 648 - protein, 29 aa, Artificial Sequence
  Synthetic peptide
  MISC_FEATURE: c-term amidation
  MOD_RES (2)..(2): Xaa is Aib
  MOD_RES (10)..(10): Acylated with a C16 fatty acyl group via gamma-Glu-gamma-Glu spacer
HXEGTFTSDKSKYLDEQAAKEFIAWLMNT

SEQ ID NO: 649 - protein, 29 aa, Artificial Sequence
  Synthetic peptide
  MISC_FEATURE: c-term amidation
  MOD_RES (2)..(2): Xaa is Aib
  MOD_RES (10)..(10): Acylated with a C16 fatty acyl group via gamma-Glu spacer
HXQGTFISDKSKYLDEQAAKEFIAWLMNT

SEQ ID NO: 650 - protein, 29 aa, Artificial Sequence
  Synthetic peptide
  MISC_FEATURE: c-term amidation
  MOD_RES (2)..(2): Xaa is Aib
  MOD_RES (10)..(10): Acylated with a C16 fatty acyl group via gamma-Glu-gamma-Glu spacer
HXQGTFISDKSKYLDEQAAKEFIAWLMNT

SEQ ID NO: 651 - protein, 29 aa, Artificial Sequence
  Synthetic peptide
  MISC_FEATURE: c-term amidation
  MOD_RES (1)..(1): Xaa is Dmia
  MOD_RES (10)..(10): Acylated with a C16 fatty acyl group via gamma-Glu spacer
  MISC_FEATURE (16)..(20): Lactam ring between side chains of amino acids at positions 16 and 20
XSQGTFTSDKSKYLDERRAKDFVQWLMNT

SEQ ID NO: 652 - protein, 29 aa, Artificial Sequence
  Synthetic peptide
  MISC_FEATURE: c-term amidation
  MOD_RES (1)..(1): Xaa is Dmia
  MOD_RES (10)..(10): Acylated with a C16 fatty acyl group via gamma-Glu-gamma-Glu spacer
  MISC_FEATURE (16)..(20): Lactam ring between side chains of amino acids at positions 16 and 20
XSQGTFTSDKSKYLDERRAKDFVQWLMNT

SEQ ID NO: 653 - protein, 29 aa, Artificial Sequence
  Synthetic peptide
  MISC_FEATURE: c-term amidation
  MOD_RES (1)..(1): Xaa is Dmia
  MISC_FEATURE (16)..(20): Lactam ring between side chains of amino acids at positions 16 and 20
  MOD_RES (29)..(29): Acylated with a C16 fatty acyl group via gamma-Glu spacer
XSQGTFTSDYSKYLDERRAKDFVQWLMNK

SEQ ID NO: 654 - protein, 29 aa, Artificial Sequence
  Synthetic peptide
  MISC_FEATURE: c-term amidation
  MOD_RES (1)..(1): Xaa is Dmia
  MISC_FEATURE (16)..(20): Lactam ring between side chains of amino acids at positions 16 and 20
  MOD_RES (29)..(29): Acylated with a C16 fatty acyl group via gamma-Glu-gamma-Glu spacer
XSQGTFTSDYSKYLDERRAKDFVQWLMNK

SEQ ID NO: 655 - protein, 29 aa, Artificial Sequence
  Synthetic peptide
  MISC_FEATURE: c-term amidation
  MOD_RES (2)..(2): Xaa is Aib
  MOD_RES (10)..(10): Acylated with a C16 fatty acyl group via gamma-Glu-gamma-Glu spacer
  MOD_RES (16)..(16): Xaa is Aib
HXQGTFTSDKSKYLDXRAAQDFVQWLMDT

SEQ ID NO: 656 - protein, 29 aa, Artificial Sequence
  Synthetic peptide
  MISC_FEATURE: c-term amidation
  MOD_RES (2)..(2): Xaa is Aib
  MOD_RES (10)..(10): Acylated with a C16 fatty acyl group via gamma-Glu spacer
  MOD_RES (16)..(16): Xaa is Aib
HXQGTFTSDKSKYLDXRAAQDFVQWLMDT

SEQ ID NO: 657 - protein, 29 aa, Artificial Sequence
  Synthetic peptide
  MISC_FEATURE: c-term amidation
  MOD_RES (2)..(2): Aminoisobutryic Acid
  MOD_RES (10)..(10): Acylated with a C16 fatty acyl group via dipeptide spacer
  MOD_RES (16)..(16): Aminoisobutryic Acid
HXQGTFTSDKSKYLDXRRAQDFVQWLMNT

SEQ ID NO: 658 - protein, 29 aa, Artificial Sequence
  Synthetic peptide
  MISC_FEATURE: c-term amidation
  MOD_RES (2)..(2): Aminoisobutyric Acid
  MOD_RES (10)..(10): Acylated with a C14 fatty acyl group via dipeptide spacer
  MOD_RES (16)..(16): Aminoisobutyric Acid
  MOD_RES (24)..(24): Pegylated
HXQGTFTSDKSKYLDXRRAQDFVCWLMNT

SEQ ID NO: 659 - protein, 29 aa, Artificial Sequence
  Synthetic peptide
  MISC_FEATURE: c-term amidation
  MOD_RES (2)..(2): Aminoisobutryic Acid
  MOD_RES (10)..(10): Acylated with a C14 fatty acyl group via dipeptide spacer
  MOD_RES (16)..(16): Aminoisobutryic Acid
HXQGTFTSDKSKYLDXRRAQDFVQWLMNT

SEQ ID NO: 660 - protein, 29 aa, Artificial Sequence
  Synthetic peptide
  MISC_FEATURE: c-term amidation
  MOD_RES (2)..(2): Aminoisobutryic Acid
  MOD_RES (10)..(10): Acylated with a C16 fatty acyl group via dipeptide spacer
  MOD_RES (16)..(16): Aminoisobutryic Acid
  MOD_RES (24)..(24): Pegylated
HXQGTFTSDKSKYLDXRRAQDFVCWLMNT

SEQ ID NO: 661 - protein, 29 aa, Artificial Sequence
  Synthetic peptide
  MISC_FEATURE: c-term amidation
  MOD_RES (10)..(10): Acylated with a C16 fatty acyl group via dipeptide spacer
HSQGTFTSDKSKYLDSRRAQDFVQWLMNT

SEQ ID NO: 662 - protein, 30 aa, Artificial Sequence; identical to SEQ ID NO: 581
  Synthetic peptide
  MISC_FEATURE: Peptide dS2E16K20K30-C14 Gluc Amide
  MISC_FEATURE: c-term amidation
  MOD_RES (2)..(2): D-serine, D-alanine, valine, amino n-butyric acid, glycine, N-methyl serine, aminoisobutyric acid
  MOD_RES (30)..(30): Acylated with a C14 fatty acyl group

SEQ ID NO: 663 - protein, 29 aa, Artificial Sequence
  Synthetic peptide
  MISC_FEATURE: Peptide dS2K10(C14)E16K20-Gluc Amide
  MISC_FEATURE: c-term amidation
  MOD_RES (2)..(2): D-serine, D-alanine, valine, amino n-butyric acid, glycine, N-methyl serine, aminoisobutyric acid
  MOD_RES (10)..(10): Acylated with a C14 fatty acyl group
HXQGTFTSDKSKYLDERRAKDFVQWLMNT

SEQ ID NO: 664 - protein, 30 aa, Artificial Sequence; identical to SEQ ID NO: 581
  Synthetic peptide
  MISC_FEATURE: Peptide dS2E16K20K30-C16 Gluc Amide
  MISC_FEATURE: c-term amidation
  MOD_RES (2)..(2): D-serine, D-alanine, valine, amino n-butyric acid, glycine, N-methyl serine, aminoisobutyric acid
  MOD_RES (30)..(30): Acylated with a C16 fatty acyl group

SEQ ID NO: 665 - protein, 29 aa, Artificial Sequence
  Synthetic peptide
  MISC_FEATURE: Peptide dS2K10(C16)E16K20-Gluc Amide
  MISC_FEATURE: c-term amidation
  MOD_RES (2)..(2): D-serine, D-alanine, valine, amino n-butyric acid, glycine, N-methyl serine, aminoisobutyric acid
  MOD_RES (10)..(10): Acylated with a C16 fatty acyl group
HXQGTFTSDKSKYLDERRAKDFVQWLMNT

SEQ ID NO: 666 - protein, 29 aa, Artificial Sequence
  Synthetic peptide
  MISC_FEATURE: c-term amidation
  MOD_RES (2)..(2): D-serine, D-alanine, valine, amino n-butyric acid, glycine, N-methyl serine, aminoisobutyric acid
  MOD_RES (10)..(10): Covalently bound to C14 fatty acyl group
HXQGTFTSDKSKYLDERRAKDFVQWLMNT

SEQ ID NO: 667 - protein, 29 aa, Artificial Sequence
  Synthetic peptide
  MISC_FEATURE: c-term amidation
  MOD_RES (2)..(2): D-serine, D-alanine, valine, amino n-butyric acid, glycine, N-methyl serine, aminoisobutyric acid
  MOD_RES (10)..(10): Covalently bound to C16 fatty acyl group
HXQGTFTSDKSKYLDERRAKDFVQWLMNT

SEQ ID NO: 668 - protein, 29 aa, Artificial Sequence
  Synthetic peptide
  MISC_FEATURE: c-term amidation
  MOD_RES (2)..(2): D-serine, D-alanine, valine, amino n-butyric acid, glycine, N-methyl serine, aminoisobutyric acid
  MOD_RES (10)..(10): Covalently bound to a C18 fatty acyl group
HXQGTFTSDKSKYLDERRAKDFVQWLMNT

SEQ ID NO: 669 - protein, 29 aa, Artificial Sequence
  Synthetic peptide
  MISC_FEATURE: c-term amidation
  MOD_RES (2)..(2): Aminoisobutryic Acid
  MOD_RES (10)..(10): Covalently bound to C14 fatty acyl group via dipeptide spacer
  MOD_RES (16)..(16): Aminoisobutryic Acid
HXQGTFTSDKSKYLDXRRAQDFVCWLMNT

SEQ ID NO: 670 - protein, 29 aa, Artificial Sequence
  Synthetic peptide
  MISC_FEATURE: Glucagon Aib2Aib16C24K10(rErE-C16) C24PEG40K amide
  MOD_RES (2)..(2): Xaa is Aib
  MOD_RES (10)..(10): Covalently bound to C14 fatty acyl group via dipeptide spacer
  MOD_RES (16)..(16): Xaa is Aib
  MOD_RES (24)..(24): Covalently bound to 40kDa PEG via thioether made by reaction of peptide with haloacetyl-activated PEG
  MOD_RES (29)..(29): AMIDATION
HXQGTFTSDKSKYLDXRRAQDFVCWLMNT

SEQ ID NO: 671 - protein, 29 aa, Artificial Sequence
  Synthetic peptide
  MISC_FEATURE: Glucagon Aib2Aib16K10(rErE-C16) amide
  MOD_RES (2)..(2): Xaa is Aib
  MOD_RES (10)..(10): Covalently bound to C16 fatty acyl group via dipeptide spacer
  MOD_RES (16)..(16): Xaa is Aib
  MOD_RES (29)..(29): AMIDATION
HXQGTFTSDKSKYLDXRRAQDFVQWLMNT

SEQ ID NO: 672 - protein, 29 aa, Artificial Sequence
  Synthetic peptide
  MISC_FEATURE: c-term amidation
  MOD_RES (2)..(2): D-serine, D-alanine, valine, amino n-butyric acid, glycine, N-methyl serine, aminoisobutyric acid
  MOD_RES (10)..(10): Acylated with a C16 fatty acyl group via acidic amino acid spacer
HXQGTFTSDKSKYLDEQAAKEFIAWLMNT

SEQ ID NO: 673 - protein, 29 aa, Artificial Sequence
  Synthetic peptide
  MISC_FEATURE: c-term amidation
  MOD_RES (2)..(2): D-serine, D-alanine, valine, amino n-butyric acid, glycine, N-methyl serine, aminoisobutyric acid
  MOD_RES (10)..(10): Acylated with a C16 fatty acyl group via dipeptide spacer
HXQGTFTSDKSKYLDEQAAKEFIAWLMNT

SEQ ID NO: 674 - protein, 29 aa, Artificial Sequence
  Synthetic peptide
  MISC_FEATURE: c-term amidation
  MOD_RES (2)..(2): Xaa is Aib
  MOD_RES (10)..(10): Acylated with a C16 fatty acyl group via acidic amino acid spacer
HXQGTFTSDKSKYLDEQAAKEFIAWLMNT

SEQ ID NO: 675 - protein, 29 aa, Artificial Sequence
  Synthetic peptide
  MISC_FEATURE: c-term amidation
  MOD_RES (2)..(2): Xaa is Aib
  MOD_RES (10)..(10): Acylated with a C16 fatty acyl group via dipeptide spacer
HXQGTFTSDKSKYLDEQAAKEFIAWLMNT

SEQ ID NO: 676 - protein, 29 aa, Artificial Sequence
  Synthetic peptide
  MISC_FEATURE: c-term amidation
  MOD_RES (2)..(2): Xaa is Aib
  MOD_RES (10)..(10): Acylated with a C16 fatty acyl group via dipeptide spacer
HXEGTFTSDKSKYLDEQAAKEFIAWLMNT

SEQ ID NO: 677 - protein, 29 aa, Artificial Sequence
  Synthetic peptide
  MISC_FEATURE: c-term amidation
  MOD_RES (2)..(2): Xaa is Aib
  MOD_RES (10)..(10): Acylated with a C16 fatty acyl group via acidic amino acid spacer
HXQGTFISDKSKYLDEQAAKEFIAWLMNT

SEQ ID NO: 678 - protein, 29 aa, Artificial Sequence
  Synthetic peptide
  MISC_FEATURE: c-term amidation
  MOD_RES (2)..(2): Xaa is Aib
  MOD_RES (10)..(10): Acylated with a C16 fatty acyl group via dipeptide spacer
HXQGTFISDKSKYLDEQAAKEFIAWLMNT

SEQ ID NO: 679 - protein, 29 aa, Artificial Sequence
  Synthetic peptide
  MISC_FEATURE: c-term amidation
  MOD_RES (1)..(1): Xaa is Dmia
  MOD_RES (10)..(10): Acylated with a C16 fatty acyl group via acidic amino acid spacer
  MISC_FEATURE (16)..(20): Lactam ring between side chains of amino acids at positions 16 and 20
XSQGTFTSDKSKYLDERRAKDFVQWLMNT

SEQ ID NO: 680 - protein, 29 aa, Artificial Sequence
  Synthetic peptide
  MISC_FEATURE: c-term amidation
  MOD_RES (1)..(1): Xaa is Dmia
  MOD_RES (10)..(10): Acylated with a C16 fatty acyl group via dipeptide spacer
  MISC_FEATURE (16)..(20): Lactam ring between side chains of amino acids at positions 16 and 20
XSQGTFTSDKSKYLDERRAKDFVQWLMNT

SEQ ID NO: 681 - protein, 29 aa, Artificial Sequence
  Synthetic peptide
  MISC_FEATURE: c-term amidation
  MOD_RES (1)..(1): Xaa is Dmia
  MISC_FEATURE (16)..(20): Lactam ring between side chains of amino acids at positions 16 and 20
  MOD_RES (29)..(29): Acylated with a C16 fatty acyl group via acidic amino acid spacer
XSQGTFTSDYSKYLDERRAKDFVQWLMNK

SEQ ID NO: 682 - protein, 29 aa, Artificial Sequence
  Synthetic peptide
  MISC_FEATURE: c-term amidation
  MOD_RES (1)..(1): Xaa is Dmia
  MISC_FEATURE (16)..(20): Lactam ring between side chains of amino acids at positions 16 and 20
  MOD_RES (29)..(29): Acylated with a C16 fatty acyl group via dipeptide spacer
XSQGTFTSDYSKYLDERRAKDFVQWLMNK

SEQ ID NO: 683 - protein, 29 aa, Artificial Sequence
  Synthetic peptide
  MISC_FEATURE: c-term amidation
  MOD_RES (2)..(2): Xaa is Aib
  MOD_RES (10)..(10): Acylated with a C16 fatty acyl group via dipeptide spacer
  MOD_RES (16)..(16): Xaa is Aib
HXQGTFTSDKSKYLDXRAAQDFVQWLMDT

SEQ ID NO: 684 - protein, 29 aa, Artificial Sequence
  Synthetic peptide
  MISC_FEATURE: c-term amidation
  MOD_RES (2)..(2): Xaa is Aib
  MOD_RES (10)..(10): Acylated with a C16 fatty acyl group via acidic amino acid spacer
  MOD_RES (16)..(16): Xaa is Aib
HXQGTFTSDKSKYLDXRAAQDFVQWLMDT

SEQ ID NO: 685 - protein, 29 aa, Artificial Sequence
  Synthetic peptide
  MOD_RES (2)..(2): Xaa is AIB
  misc_feature (16)..(16): Xaa can be any naturally occurring amino acid
  misc_feature (20)..(20): Xaa can be any naturally occurring amino acid
  MOD_RES (29)..(29): C-terminal amidation
HSQGTFTSDYSKYLDXQAAXGFIAWLMNT

SEQ ID NO: 686 - protein, 29 aa, Artificial Sequence
  Synthetic peptide
  MOD_RES (2)..(2): Xaa is AIB
  MOD_RES (10)..(10): Acylated with C16 fatty acyl group
  MOD_RES (16)..(16): Xaa is AIB
  MOD_RES (29)..(29): C-terminal amidation
HXQGTFTSDKSKYLDXRAAQDFVQWLMDT

SEQ ID NO: 687 - protein, 29 aa, Artificial Sequence
  Synthetic peptide
  MOD_RES (2)..(2): Xaa is AIB
  MOD_RES (10)..(10): Acylated with C14 fatty acyl group via dipeptide spacer
  MOD_RES (16)..(16): Xaa is AIB
  MOD_RES (29)..(29): C-terminal amidation
HXQGTFTSDKSKYLDXRAAQDFVQWLMDT

SEQ ID NO: 688 - protein, 29 aa, Artificial Sequence
  Synthetic peptide
  MOD_RES (2)..(2): Xaa is AIB
  MOD_RES (10)..(10): Acylated with C18 fatty acyl group via dipeptide spacer
  MOD_RES (16)..(16): Xaa is AIB
  MOD_RES (29)..(29): C-terminal amidation
HXQGTFTSDKSKYLDXRAAQDFVQWLMDT

SEQ ID NO: 689 - protein, 29 aa, Artificial Sequence
  Synthetic peptide
  MOD_RES (2)..(2): Xaa is AIB
  MOD_RES (10)..(10): Acylated with C16 fatty acyl group via dipeptide spacer
  MOD_RES (16)..(16): Xaa is AIB
  MOD_RES (29)..(29): C-terminal amidation
HXEGTFTSDKSKYLDXRAAQDFVQWLMDT

SEQ ID NO: 690 - protein, 29 aa, Artificial Sequence
  Synthetic peptide
  MOD_RES (2)..(2): Xaa is AIB
  MOD_RES (10)..(10): Acylated with C16 fatty acyl group via dipeptide spacer
  MOD_RES (16)..(16): Xaa is AIB
HXQGTFISDKSKYLDXRAAQDFVQWLMDT

SEQ ID NO: 691 - protein, 29 aa, Artificial Sequence
  Synthetic peptide
  MOD_RES (2)..(2): Xaa is AIB
  MOD_RES (10)..(10): Acylated with C16 fatty acyl group via dipeptide spacer
  MOD_RES (29)..(29): C-terminal amidation
HXQGTFTSDKSKYLDERAAQDFVQWLMDT

SEQ ID NO: 692 - protein, 29 aa, Artificial Sequence
  Synthetic peptide
  MOD_RES (2)..(2): Xaa is AIB
  MOD_RES (10)..(10): Acylated with C16 fatty acyl group via dipeptide spacer
  MOD_RES (16)..(16): Xaa is AIB
  MOD_RES (29)..(29): C-terminal amidation
HXQGTFTSDKSKYLEXRAAQDFVQWLMDT

SEQ ID NO: 693 - protein, 29 aa, Artificial Sequence
  Synthetic peptide
  MOD_RES (2)..(2): d-Ser
  MOD_RES (10)..(10): Acylated with C16 fatty acyl group via dipeptide spacer
  MOD_RES (16)..(16): Xaa is AIB
  MOD_RES (29)..(29): C-terminal amidation
HSQGTFTSDKSKYLDXRAAQDFVQWLMDT

SEQ ID NO: 694 - protein, 29 aa, Artificial Sequence
  Synthetic peptide
  MOD_RES (2)..(2): Xaa is AIB
  MOD_RES (10)..(10): Acylated with C16 fatty acyl group via dipeptide spacer
  MOD_RES (16)..(16): Xaa is AIB
  MOD_RES (29)..(29): C-terminal amidation
HXQGTFTSDKSKYLDXRAAQDFVQWLLDT

SEQ ID NO: 695 - protein, 29 aa, Artificial Sequence
  Synthetic peptide
  MOD_RES (2)..(2): Xaa is AIB
  MOD_RES (10)..(10): Acylated with C16 fatty acyl group via dipeptide spacer
  MOD_RES (29)..(29): C-terminal amidation
HXQGTFTSDKSKYLDEQAAKEFIAWLLDT

SEQ ID NO: 696 - protein, 29 aa, Artificial Sequence
  Synthetic peptide
  MOD_RES (2)..(2): Xaa is AIB
  MOD_RES (10)..(10): Acylated with C16 fatty acyl group via gamma-Glu spacer
  MOD_RES (29)..(29): C-terminal amidation
HXQGTFTSDKSKYLDEQAAKEFICWLLDT

SEQ ID NO: 697 - protein, 29 aa, Artificial Sequence
  Synthetic peptide
  MOD_RES (2)..(2): Xaa is AIB
  MOD_RES (10)..(10): Acylated with C16 fatty acyl group via gamma-Glu spacer
  MOD_RES (24)..(24): PEGYLATION
  MOD_RES (29)..(29): C-terminal amidation
HXQGTFTSDKSKYLDEQAAKEFICWLLDT

SEQ ID NO: 698 - protein, 29 aa, Artificial Sequence
  Synthetic peptide
  MOD_RES (2)..(2): Xaa is AIB
  MOD_RES (10)..(10): Acylated with C16 fatty acyl group via gamma-Glu spacer
  MOD_RES (24)..(24): PEGYLATION
  MOD_RES (29)..(29): C-terminal amidation
HXQGTFTSDKSKYLDERAAQDFVCWLLDT

SEQ ID NO: 699 - protein, 30 aa, Artificial Sequence
  Synthetic peptide
  MOD_RES (2)..(2): Xaa is AIB
  MOD_RES (10)..(10): Acylated with C16 fatty acyl group via gamma-Glu spacer
  MOD_RES (30)..(30): PEGYLATION
  MOD_RES (30)..(30): C-terminal amidation
HXQGTFTSDKSKYLDEQAAKEFIQWLLDTC

SEQ ID NO: 700 - protein, 29 aa, Artificial Sequence
  Synthetic peptide
  MOD_RES (10)..(10): Acylated with C16 fatty acyl group via gamma-Glu spacer
  MOD_RES (24)..(24): PEGYLATION
  MOD_RES (29)..(29): C-terminal amidation
HAQGTFTSDKSKYLDERAAQDFVCWLLDT

SEQ ID NO: 701 - protein, 29 aa, Artificial Sequence
  Synthetic peptide
  MOD_RES (2)..(2): d-Ser
  MOD_RES (10)..(10): Acylated with C16 fatty acyl group via gamma-Glu spacer
  MOD_RES (29)..(29): C-terminal amidation
HSQGTFTSDKSKYLDEQAAKEFICWLLDT

SEQ ID NO: 702 - protein, 29 aa, Artificial Sequence
  Synthetic peptide
  MOD_RES (2)..(2): d-Ser
  MOD_RES (10)..(10): Acylated with C16 fatty acyl group via gamma-Glu spacer
  MOD_RES (29)..(29): C-terminal amidation
HSQGTFTSDKSKYLDERAAQDFVQWLLDT

SEQ ID NO: 703 - protein, 29 aa, Artificial Sequence
  Synthetic peptide
  MOD_RES (2)..(2): d-Ser
  MOD_RES (10)..(10): Acylated with C16 fatty acyl group via gamma-Glu spacer
  MOD_RES (29)..(29): C-terminal amidation
HSQGTFTSDKSKYLDERAAQDFVCWLLDT

SEQ ID NO: 704 - protein, 29 aa, Artificial Sequence
  Synthetic peptide
  MOD_RES (2)..(2): d-Ser
  MOD_RES (10)..(10): Acylated with C16 fatty acyl group via gamma-Glu spacer
HSQGTFTSDKSKYLDEQAAKEFICWLLDT

SEQ ID NO: 705 - protein, 31 aa, Artificial Sequence
  Synthetic peptide
  MOD_RES (2)..(2): d-Ser
  MOD_RES (10)..(10): Acylated with C16 fatty acyl group via gamma-Glu spacer
  MOD_RES (31)..(31): C-terminal amidation
HSQGTFTSDKSKYLDEQAAKEFICWLLDTGE

SEQ ID NO: 706 - protein, 31 aa, Artificial Sequence
  Synthetic peptide
  MOD_RES (2)..(2): d-Ser
  MOD_RES (10)..(10): Acylated with C16 fatty acyl group via gamma-Glu spacer
  MOD_RES (24)..(24): PEGYLATION
HSQGTFTSDKSKYLDEQAAKEFICWLLDTGG

SEQ ID NO: 707 - protein, 29 aa, Artificial Sequence
  Synthetic peptide
  MOD_RES (2)..(2): d-Ser
  MOD_RES (10)..(10): Acylated with C16 fatty acyl group via gamma-Glu spacer
  MOD_RES (24)..(24): PEGYLATION
  MOD_RES (29)..(29): C-terminal amidation
HSQGTFTSDKSKYLDERAAQDFVCWLLDT

SEQ ID NO: 708 - protein, 30 aa, Artificial Sequence
  Synthetic peptide
  MOD_RES (2)..(2): d-Ser
  MOD_RES (10)..(10): Acylated with C16 fatty acyl group via gamma-Glu spacer
  MOD_RES (30)..(30): PEGYLATION
  MOD_RES (30)..(30): C-terminal amidation
HSQGTFTSDKSKYLDERAAQDFVQWLLDTC

SEQ ID NO: 709 - protein, 30 aa, Artificial Sequence
  Synthetic peptide
  MOD_RES (2)..(2): d-Ser
  MOD_RES (10)..(10): Acylated with C16 fatty acyl group via gamma-Glu spacer
  MOD_RES (24)..(24): PEGYLATION
  MOD_RES (30)..(30): C-terminal amidation
HSQGTFTSDYSKYLDSRRAQDFVQWLMNTE

SEQ ID NO: 710 - protein, 30 aa, Artificial Sequence
  Synthetic peptide
  MOD_RES (2)..(2): d-Ser
  MOD_RES (10)..(10): Acylated with C16 fatty acyl group via gamma-Glu spacer
  MOD_RES (24)..(24): PEGYLATION
HSQGTFTSDKSKYLDEQAAKEFICWLLDTC

SEQ ID NO: 711 - protein, 29 aa, Artificial Sequence
  Synthetic peptide
  MOD_RES (1)..(1): Xaa is DMIA
  MOD_RES (10)..(10): Acylated with C16 fatty acyl group via gamma-Glu spacer
  MOD_RES (29)..(29): C-terminal amidation
XSQGTFTSDKSKYLDEQAAKEFICWLLDT

SEQ ID NO: 712 - protein, 29 aa, Artificial Sequence
  Synthetic peptide
  MOD_RES (1)..(1): des-amino-His
  MOD_RES (10)..(10): Acylated with C16 fatty acyl group via gamma-Glu spacer
  MOD_RES (29)..(29): C-terminal amidation
HSQGTFTSDKSKYLDEQAAKEFICWLLDT

SEQ ID NO: 713 - protein, 29 aa, Artificial Sequence
  Synthetic peptide
  MOD_RES (1)..(1): Ac-His
  MOD_RES (10)..(10): Acylated with C16 fatty acyl group via gamma-Glu spacer
  MOD_RES (24)..(24): PEGYLATION
  MOD_RES (29)..(29): C-terminal amidation
HSQGTFTSDKSKYLDEQAAKEFICWLLDT

SEQ ID NO: 714 - protein, 29 aa, Artificial Sequence
  Synthetic peptide
  MOD_RES (2)..(2): Xaa is AIB
  MOD_RES (10)..(10): Acylated with C16 fatty acyl group via gamma-Glu spacer
  MOD_RES (29)..(29): C-terminal amidation
HXQGTFTSDKSKYLDEEAVRLFIEWLMNT

SEQ ID NO: 715 - protein, 29 aa, Artificial Sequence
  Synthetic peptide
  MOD_RES (2)..(2): Xaa is AIB
  MOD_RES (10)..(10): Acylated with C16 fatty acyl group
  MOD_RES (29)..(29): C-terminal amidation
HXQGTFTSDKSKYLDEEAVRLFIEWLMNT

SEQ ID NO: 716 - protein, 29 aa, Artificial Sequence
  Synthetic peptide
  MOD_RES (2)..(2): Xaa is AIB
  MOD_RES (24)..(24): PEGYLATION
  MOD_RES (29)..(29): C-terminal amidation
HXQGTFTSDYSKYLDEEAVRLFICWLMNT

SEQ ID NO: 717 - protein, 29 aa, Artificial Sequence
  Synthetic peptide
  MOD_RES (2)..(2): Xaa is AIB
  MOD_RES (29)..(29): C-terminal amidation
HXQGTFTSDYSKYLDEEAVRLFIEWLMNT

SEQ ID NO: 718 - protein, 29 aa, Artificial Sequence
  Synthetic peptide
  MOD_RES (2)..(2): Xaa is AIB
  MOD_RES (29)..(29): C-terminal amidation
HXQGTFTSDYSKYLDEEAVRLFICWLMNT

SEQ ID NO: 719 - protein, 29 aa, Artificial Sequence
  Synthetic peptide
  MOD_RES (2)..(2): d-Ser
  MOD_RES (24)..(24): PEGYLATION
  MOD_RES (29)..(29): C-terminal amidation
HSQGTFTSDYSKYLDEEAVRLFICWLMNT

SEQ ID NO: 720 - protein, 29 aa, Artificial Sequence
  Synthetic peptide
  MOD_RES (2)..(2): d-Ser
  MOD_RES (29)..(29): C-terminal amidation
HSQGTFTSDYSKYLDEEAVRLFIEWLMNT

SEQ ID NO: 721 - protein, 29 aa, Artificial Sequence
  Synthetic peptide
  MOD_RES (2)..(2): d-Ser
  MOD_RES (29)..(29): C-terminal amidation
HSQGTFTSDYSKYLDEEAVRLFICWLMNT

SEQ ID NO: 722 - protein, 29 aa, Artificial Sequence
  Synthetic peptide
  MOD_RES (10)..(10): Acylated with C16 fatty acyl group via acidic amino acid spacer
  MOD_RES (29)..(29): C-terminal amidation
HSQGTFTSDKSKYLDEEAVRLFIEWLMNT

SEQ ID NO: 723 - protein, 29 aa, Artificial Sequence
  Synthetic peptide
  MOD_RES (10)..(10): Acylated with C16 fatty acyl group via gamma-Glu spacer
  MOD_RES (29)..(29): C-terminal amidation
HSQGTFTSDKSKYLDEEAVRLFIEWLMNT

SEQ ID NO: 724 - protein, 29 aa, Artificial Sequence
  Synthetic peptide
  MOD_RES (2)..(2): Xaa is AIB
  MISC_FEATURE (16)..(20): Salt bridge
  MISC_FEATURE (17)..(21): Salt bridge
  MOD_RES (24)..(24): PEGYLATION
  MOD_RES (29)..(29): C-terminal amidation
HXQGTFTSDYSKYLDEKRAKEFVCWLMNT

SEQ ID NO: 725 - protein, 29 aa, Artificial Sequence
  Synthetic peptide
  MOD_RES (2)..(2): Xaa is AIB
  MOD_RES (16)..(16): Xaa is AIB
  MISC_FEATURE (16)..(20): Salt bridge
  MISC_FEATURE (17)..(21): Salt bridge
  MOD_RES (24)..(24): PEGYLATION
  MOD_RES (29)..(29): C-terminal amidation
HXQGTFTSDYSKYLDXKRAKEFVCWLMNT

SEQ ID NO: 726 - protein, 29 aa, Artificial Sequence
  Synthetic peptide
  MOD_RES (2)..(2): d-Ser
  MISC_FEATURE (16)..(20): Salt bridge
  MISC_FEATURE (17)..(21): Salt bridge
  MOD_RES (24)..(24): PEGYLATION
  MOD_RES (29)..(29): C-terminal amidation
HSQGTFTSDYSKYLDEKRAKEFVCWLMNT

SEQ ID NO: 727 - protein, 29 aa, Artificial Sequence
  Synthetic peptide
  MOD_RES (2)..(2): d-Ser
  MOD_RES (16)..(16): Xaa is AIB
  MISC_FEATURE (16)..(20): Salt bridge
  MISC_FEATURE (17)..(21): Salt bridge
  MOD_RES (24)..(24): PEGYLATION
  MOD_RES (29)..(29): C-terminal amidation
HSQGTFTSDYSKYLDXKRAKEFVCWLMNT

SEQ ID NO: 728 - protein, 29 aa, Artificial Sequence
  Synthetic peptide
  MOD_RES (2)..(2): d-Ser
  MISC_FEATURE (16)..(20): Salt bridge
  MISC_FEATURE (17)..(21): Salt bridge
  MOD_RES (29)..(29): C-terminal amidation
HSQGTFTSDYSKYLDEKRAKEFVQWLMNT

SEQ ID NO: 729 - protein, 29 aa, Artificial Sequence
  Synthetic peptide
  MOD_RES (2)..(2): D-serine, D-alanine, valine, amino n-butyric acid, glycine, N-methyl serine, aminoisobutyric acid
  MOD_RES (16)..(16): Xaa is AIB
  MISC_FEATURE (16)..(20): Salt bridge
  MISC_FEATURE (17)..(21): Salt bridge
  MOD_RES (29)..(29): C-terminal amidation
HSQGTFTSDYSKYLDXKRAKEFVQWLMNT

SEQ ID NO: 730 - protein, 29 aa, Artificial Sequence
  Synthetic peptide
  MOD_RES (2)..(2): D-serine, D-alanine, valine, amino n-butyric acid, glycine, N-methyl serine, aminoisobutyric acid
  MOD_RES (10)..(10): Acylated with C16 fatty acyl group via gamma-Glu spacer
  MISC_FEATURE (15)..(20): Salt bridge
  MOD_RES (16)..(16): Xaa is AIB
  MISC_FEATURE (16)..(21): Salt bridge
  MOD_RES (29)..(29): C-terminal amidation
HSQGTFTSDKSKYLDXKRAKEFVQWLMNT

SEQ ID NO: 731 - protein, 29 aa, Artificial Sequence
  Synthetic peptide
  MOD_RES (1)..(1): Xaa is DMIA
  MOD_RES (16)..(16): Xaa is AIB
  MISC_FEATURE (16)..(20): Salt bridge
  MISC_FEATURE (17)..(21): Salt bridge
  MOD_RES (24)..(24): PEGYLATION
  MOD_RES (29)..(29): C-terminal amidation
XSQGTFTSDYSKYLDXKRAKEFVCWLMNT

SEQ ID NO: 732 - protein, 29 aa, Artificial Sequence
  Synthetic peptide
  MISC_FEATURE (16)..(20): Salt bridge
  MISC_FEATURE (17)..(21): Salt bridge
  MOD_RES (29)..(29): C-terminal amidation
HSQGTFTSDYSKYLDEKRAKEFVQWLMNT

SEQ ID NO: 733 - protein, 29 aa, Artificial Sequence
  Synthetic peptide
  MOD_RES (2)..(2): D-serine, D-alanine, valine, amino n-butyric acid, glycine, N-methyl serine, aminoisobutyric acid
  MOD_RES (10)..(10): Acylated with C16 fatty acyl group via dipeptide spacer
  MOD_RES (16)..(16): Xaa is AIB
  MOD_RES (29)..(29): C-terminal amidation
HXQGTFTSDKSKYLDXRAAQDFVQWLMDT

SEQ ID NO: 734 - protein, 29 aa, Artificial Sequence
  Synthetic peptide
  MOD_RES (2)..(2): Xaa is AIB
  MOD_RES (10)..(10): Acylated with C16 fatty acyl group via acidic amino acid spacer
  MOD_RES (29)..(29): C-terminal amidation
HXQGTFTSDKSKYLDEQAAKEFICWLLDT

SEQ ID NO: 735 - protein, 29 aa, Artificial Sequence
  Synthetic peptide
  MOD_RES (2)..(2): Xaa is AIB
  MOD_RES (10)..(10): Acylated with C16 fatty acyl group via acidic amino acid spacer
  MOD_RES (24)..(24): PEGYLATION
  MOD_RES (29)..(29): C-terminal amidation
HXQGTFTSDKSKYLDEQAAKEFICWLLDT

SEQ ID NO: 736 - protein, 29 aa, Artificial Sequence
  Synthetic peptide
  MOD_RES (2)..(2): Xaa is AIB
  MOD_RES (10)..(10): Acylated with C16 fatty acyl group via acidic amino acid spacer
  MOD_RES (24)..(24): PEGYLATION
  MOD_RES (29)..(29): C-terminal amidation
HXQGTFTSDKSKYLDERAAQDFVCWLLDT

SEQ ID NO: 737 - protein, 30 aa, Artificial Sequence; identical to SEQ ID NO: 699
  Synthetic peptide
  MOD_RES (2)..(2): Xaa is AIB
  MOD_RES (10)..(10): Acylated with C16 fatty acyl group via acidic amino acid spacer
  MOD_RES (30)..(30): PEGYLATION
  MOD_RES (30)..(30): C-terminal amidation

SEQ ID NO: 738 - protein, 29 aa, Artificial Sequence
  Synthetic peptide
  MOD_RES (10)..(10): Acylated with C16 fatty acyl group via acidic amino acid spacer
  MOD_RES (24)..(24): PEGYLATION
  MOD_RES (29)..(29): C-terminal amidation
HAQGTFTSDKSKYLDERAAQDFVCWLLDT

SEQ ID NO: 739 - protein, 29 aa, Artificial Sequence
  Synthetic peptide
  MOD_RES (2)..(2): D-serine, D-alanine, valine, amino n-butyric acid, glycine, N-methyl serine, aminoisobutyric acid
  MOD_RES (10)..(10): Acylated with C16 fatty acyl group via acidic amino acid spacer
  MOD_RES (29)..(29): C-terminal amidation
HXQGTFTSDKSKYLDEQAAKEFICWLLDT

SEQ ID NO: 740 - protein, 29 aa, Artificial Sequence
  Synthetic peptide
  MOD_RES (2)..(2): D-serine, D-alanine, valine, amino n-butyric acid, glycine, N-methyl serine, aminoisobutyric acid
  MOD_RES (10)..(10): Acylated with C16 fatty acyl group via acidic amino acid spacer
  MOD_RES (29)..(29): C-terminal amidation
HXQGTFTSDKSKYLDERAAQDFVQWLLDT

SEQ ID NO: 741 - protein, 29 aa, Artificial Sequence
  Synthetic peptide
  MOD_RES (2)..(2): D-serine, D-alanine, valine, amino n-butyric acid, glycine, N-methyl serine, aminoisobutyric acid
  MOD_RES (10)..(10): Acylated with C16 fatty acyl group via acidic amino acid spacer
  MOD_RES (29)..(29): C-terminal amidation
HXQGTFTSDKSKYLDERAAQDFVCWLLDT

SEQ ID NO: 742 - protein, 29 aa, Artificial Sequence
  Synthetic peptide
  MOD_RES (2)..(2): D-serine, D-alanine, valine, amino n-butyric acid, glycine, N-methyl serine, aminoisobutyric acid
  MOD_RES (10)..(10): Acylated with C16 fatty acyl group via acidic amino acid spacer
HXQGTFTSDKSKYLDEQAAKEFICWLLDT

SEQ ID NO: 743 - protein, 31 aa, Artificial Sequence
  Synthetic peptide
  MOD_RES (2)..(2): D-serine, D-alanine, valine, amino n-butyric acid, glycine, N-methyl serine, aminoisobutyric acid
  MOD_RES (10)..(10): Acylated with C16 fatty acyl group via acidic amino acid spacer
  MOD_RES (31)..(31): C-terminal amidation
HXQGTFTSDKSKYLDEQAAKEFICWLLDTGE

SEQ ID NO: 744 - protein, 31 aa, Artificial Sequence
  Synthetic peptide
  MOD_RES (2)..(2): D-serine, D-alanine, valine, amino n-butyric acid, glycine, N-methyl serine, aminoisobutyric acid
  MOD_RES (10)..(10): Acylated with C16 fatty acyl group via acidic amino acid spacer
  MOD_RES (24)..(24): PEGYLATION
HXQGTFTSDKSKYLDEQAAKEFICWLLDTGG

SEQ ID NO: 745 - protein, 29 aa, Artificial Sequence
  Synthetic peptide
  MOD_RES (2)..(2): D-serine, D-alanine, valine, amino n-butyric acid, glycine, N-methyl serine, aminoisobutyric acid
  MOD_RES (10)..(10): Acylated with C16 fatty acyl group via acidic amino acid spacer
  MOD_RES (24)..(24): PEGYLATION
  MOD_RES (29)..(29): C-terminal amidation
HXQGTFTSDKSKYLDERAAQDFVCWLLDT

SEQ ID NO: 746 - protein, 30 aa, Artificial Sequence
  Synthetic peptide
  MOD_RES (2)..(2): D-serine, D-alanine, valine, amino n-butyric acid, glycine, N-methyl serine, aminoisobutyric acid
  MOD_RES (10)..(10): Acylated with C16 fatty acyl group via acidic amino acid spacer
  MOD_RES (30)..(30): PEGYLATION
  MOD_RES (30)..(30): C-terminal amidation
HXQGTFTSDKSKYLDERAAQDFVQWLLDTC

SEQ ID NO: 747 - protein, 30 aa, Artificial Sequence
  Synthetic peptide
  MOD_RES (2)..(2): D-serine, D-alanine, valine, amino n-butyric acid, glycine, N-methyl serine, aminoisobutyric acid
  MOD_RES (10)..(10): Acylated with C16 fatty acyl group via acidic amino acid spacer
  MOD_RES (24)..(24): PEGYLATION
  MOD_RES (30)..(30): C-terminal amidation
HXQGTFTSDYSKYLDSRRAQDFVQWLMNTE

SEQ ID NO: 748 - protein, 30 aa, Artificial Sequence
  Synthetic peptide
  MOD_RES (2)..(2): D-serine, D-alanine, valine, amino n-butyric acid, glycine, N-methyl serine, aminoisobutyric acid
  MOD_RES (10)..(10): Acylated with C16 fatty acyl group via acidic amino acid spacer
  MOD_RES (24)..(24): PEGYLATION
HXQGTFTSDKSKYLDEQAAKEFICWLLDTC

SEQ ID NO: 749 - protein, 29 aa, Artificial Sequence
  Synthetic peptide
  MOD_RES (1)..(1): Xaa is DMIA
  MOD_RES (10)..(10): Acylated with C16 fatty acyl group via acidic amino acid spacer
  MOD_RES (29)..(29): C-terminal amidation
XSQGTFTSDKSKYLDEQAAKEFICWLLDT

SEQ ID NO: 750 - protein, 29 aa, Artificial Sequence
  Synthetic peptide
  MOD_RES (1)..(1): des-amino-His
  MOD_RES (10)..(10): Acylated with C16 fatty acyl group via acidic amino acid spacer
  MOD_RES (29)..(29): C-terminal amidation
HSQGTFTSDKSKYLDEQAAKEFICWLLDT

SEQ ID NO: 751 - protein, 29 aa, Artificial Sequence
  Synthetic peptide
  MOD_RES (1)..(1): Ac-His
  MOD_RES (10)..(10): Acylated with C16 fatty acyl group via acidic amino acid spacer
  MOD_RES (24)..(24): PEGYLATION
  MOD_RES (29)..(29): C-terminal amidation
HSQGTFTSDKSKYLDEQAAKEFICWLLDT

SEQ ID NO: 752 - protein, 29 aa, Artificial Sequence
  Synthetic peptide
  MOD_RES (2)..(2): Xaa is AIB
  MOD_RES (10)..(10): Acylated with C16 fatty acyl group via acidic amino acid spacer
  MOD_RES (29)..(29): C-terminal amidation
HXQGTFTSDKSKYLDEEAVRLFIEWLMNT

SEQ ID NO: 753 - protein, 29 aa, Artificial Sequence
  Synthetic peptide
  MOD_RES (2)..(2): D-serine, D-alanine, valine, amino n-butyric acid, glycine, N-methyl serine, aminoisobutyric acid
  MOD_RES (24)..(24): PEGYLATION
  MOD_RES (29)..(29): C-terminal amidation
HXQGTFTSDYSKYLDEEAVRLFICWLMNT

SEQ ID NO: 754 - protein, 29 aa, Artificial Sequence
  Synthetic peptide
  MOD_RES (2)..(2): D-serine, D-alanine, valine, amino n-butyric acid, glycine, N-methyl serine, aminoisobutyric acid
  MOD_RES (29)..(29): C-terminal amidation
HXQGTFTSDYSKYLDEEAVRLFIEWLMNT

SEQ ID NO: 755 - protein, 29 aa, Artificial Sequence
  Synthetic peptide
  MOD_RES (2)..(2): D-serine, D-alanine, valine, amino n-butyric acid, glycine, N-methyl serine, aminoisobutyric acid
  MOD_RES (29)..(29): C-terminal amidation
HXQGTFTSDYSKYLDEEAVRLFICWLMNT

SEQ ID NO: 756 - protein, 29 aa, Artificial Sequence
  Synthetic peptide
  MOD_RES (10)..(10): Acylated with C16 fatty acyl group via acidic amino acid spacer
  MOD_RES (29)..(29): C-terminal amidation
HSQGTFTSDKSKYLDEEAVRLFIEWLMNT

SEQ ID NO: 757 - protein, 29 aa, Artificial Sequence
  Synthetic peptide
  MOD_RES (2)..(2): D-serine, D-alanine, valine, amino n-butyric acid, glycine, N-methyl serine, aminoisobutyric acid
  MISC_FEATURE (16)..(20): Salt bridge
  MISC_FEATURE (17)..(21): Salt bridge
  MOD_RES (24)..(24): PEGYLATION
  MOD_RES (29)..(29): C-terminal amidation
HXQGTFTSDYSKYLDEKRAKEFVCWLMNT

SEQ ID NO: 758 - protein, 29 aa, Artificial Sequence
  Synthetic peptide
  MOD_RES (2)..(2): D-serine, D-alanine, valine, amino n-butyric acid, glycine, N-methyl serine, aminoisobutyric acid
  MOD_RES (16)..(16): Xaa is AIB
  MISC_FEATURE (16)..(20): Salt bridge
  MISC_FEATURE (17)..(21): Salt bridge
  MOD_RES (24)..(24): PEGYLATION
  MOD_RES (29)..(29): C-terminal amidation
HSQGTFTSDYSKYLDXKRAKEFVCWLMNT

SEQ ID NO: 759 - protein, 29 aa, Artificial Sequence
  Synthetic peptide
  MOD_RES (2)..(2): D-serine, D-alanine, valine, amino n-butyric acid, glycine, N-methyl serine, aminoisobutyric acid
  MISC_FEATURE (16)..(20): Salt bridge
  MISC_FEATURE (17)..(21): Salt bridge
  MOD_RES (29)..(29): C-terminal amidation
HSQGTFTSDYSKYLDEKRAKEFVQWLMNT

SEQ ID NO: 760 - protein, 29 aa, Artificial Sequence
  Synthetic peptide
  MOD_RES (2)..(2): D-serine, D-alanine, valine, amino n-butyric acid, glycine, N-methyl serine, aminoisobutyric acid
  MOD_RES (10)..(10): Acylated with C16 fatty acyl group via acidic amino acid spacer
  MISC_FEATURE (15)..(20): Salt bridge
  MOD_RES (16)..(16): Xaa is AIB
  MISC_FEATURE (16)..(21): Salt bridge
  MOD_RES (29)..(29): C-terminal amidation
HSQGTFTSDKSKYLDXKRAKEFVQWLMNT

SEQ ID NO: 761-800 - skipped (40 entries)

SEQ ID NO: 801 - protein, 29 aa, Homo sapiens
HSQGTFTSDYSKYLDSRRAQDFVQWLMNT

SEQ ID NO: 802 - protein, 29 aa, Artificial Sequence
  Glucagon analogue
  MOD_RES (16)..(16): Xaa is Ser, Cys, Orn, homocysteine or acetyl phenyalanine
  MOD_RES (27)..(27): Xaa is Met, Leu or Nle
HSQGTFTSDYSKYLDXRRAQDFVQWLXDT

SEQ ID NO: 803 - protein, 29 aa, Artificial Sequence
  Glucagon analogue
  MOD_RES (17)..(17): Xaa is Arg, Cys, Orn, homocysteine or acetyl phenyalanine
  MOD_RES (27)..(27): Xaa is Met, Leu or Nle
HSQGTFTSDYSKYLDSXRAQDFVQWLXDT

SEQ ID NO: 804 - protein, 29 aa, Artificial Sequence
  Glucagon analogue
  MOD_RES (21)..(21): Xaa is Asp, Cys, Orn, homocysteine or acetyl phenylalanine
  MOD_RES (27)..(27): Xaa is Met, Leu or Nle
HSQGTFTSDYSKYLDSRRAQXFVQWLXDT

SEQ ID NO: 805 - protein, 29 aa, Artificial Sequence
  Synthetic peptide
  MOD_RES (24)..(24): Xaa is Gln, Cys, Orn, homocysteine or acetyl phenylalanine
  MOD_RES (27)..(27): Xaa is Met, Leu or Nle
HSQGTFTSDYSKYLDSRRAQDFVXWLXDT

SEQ ID NO: 806 - protein, 29 aa, Artificial Sequence
  Glucagon analogue
  MOD_RES (21)..(21): Xaa is Asp, Cys, Orn, homocysteine or acetyl phenyalanine
  MOD_RES (24)..(24): Xaa is Gln, Cys, Orn, homocysteine or acetyl phenyalanine
  MOD_RES (27)..(27): Xaa is Met, Leu or Nle
HSQGTFTSDYSKYLDSRRAQXFVXWLXDT

SEQ ID NO: 807 - protein, 29 aa, Artificial Sequence
  Glucagon analogue
  MOD_RES (27)..(27): Xaa is Met, Leu or Nle
  MOD_RES (28)..(28): Xaa is Lys, Arg, His, Asp, Glu, cysteic acid or homocysteic acid
  MOD_RES (29)..(29): Xaa is Thr, Lys, Arg, His, Asp, Glu, cysteic acid or homocysteic acid
HSQGTFTSDYSKYLDSRRAQDFVQWLXXX

SEQ ID NO: 808 - protein, 29 aa, Artificial Sequence
  Glucagon analogue
  MOD_RES (27)..(27): Xaa is Met, Leu or Nle
  MOD_RES (28)..(28): Xaa is Asp or Glu
  MOD_RES (29)..(29): Xaa is Thr, Asp or Glu
HSQGTFTSDYSKYLDSRRAQDFVQWLXXX

SEQ ID NO: 809 - protein, 29 aa, Artificial Sequence
  Glucagon analogue
  MOD_RES (27)..(27): Xaa is Met, Leu or Nle
  MOD_RES (29)..(29): Xaa is Asp or Glu
HSQGTFTSDYSKYLDSRRAQDFVQWLXNX

SEQ ID NO: 810 - protein, 29 aa, Artificial Sequence
  Synthetic peptide
  MOD_RES (27)..(27): Xaa is Met, Leu or Nle
HSQGTFTSDYSKYLDSRRAQDFVQWLXDT

SEQ ID NO: 811 - protein, 29 aa, Artificial Sequence
  Glucagon analogue
HSQGTFTSDYSKYLDSRRAQDFVQWLMDT

SEQ ID NO: 812 - protein, 29 aa, Artificial Sequence
  Glucagon analogue
  MOD_RES (29)..(29): Xaa is Lys, Arg or His
HSQGTFTSDYSKYLDSRRAQDFVQWLMNX

SEQ ID NO: 813 - protein, 29 aa, Artificial Sequence
  Glucagon analogue
HSQGTFTSDYSKYLESRRAQDFVQWLMDT

SEQ ID NO: 814 - protein, 29 aa, Artificial Sequence
  Synthetic peptide
  MOD_RES (16)..(16): Pegylation
  MOD_RES (27)..(27): Xaa is Met, Leu or Nle
HSQGTFTSDYSKYLDCRRAQDFVQWLXDT

SEQ ID NO: 815 - protein, 29 aa, Artificial Sequence
  Glucagon analogue
  MOD_RES (17)..(17): Pegylation
  MOD_RES (27)..(27): Xaa is Met, Leu or Nle
HSQGTFTSDYSKYLDSCRAQDFVQWLXDT

SEQ ID NO: 816 - protein, 29 aa, Artificial Sequence
  Glucagon analogue
  MOD_RES (21)..(21): Pegylation
  MOD_RES (27)..(27): Xaa is Met, Leu or Nle
HSQGTFTSDYSKYLDSRRAQCFVQWLXDT

SEQ ID NO: 817 - protein, 29 aa, Artificial Sequence
  Glucagon analogue
  MOD_RES (24)..(24): Pegylation
  MOD_RES (27)..(27): Xaa is Met, Leu or Nle
HSQGTFTSDYSKYLDSRRAQDFVCWLXDT

SEQ ID NO: 818 - protein, 29 aa, Artificial Sequence
  Glucagon analogue
  MOD_RES (21)..(21): Pegylation
  MOD_RES (27)..(27): Xaa is Met, Leu or Nle
HSQGTFTSDYSRYLDSRRAQKFVQWLXDT

SEQ ID NO: 819 - protein, 29 aa, Artificial Sequence
  Glucagon analogue
  MOD_RES (24)..(24): Pegylation
  MOD_RES (27)..(27): Xaa is Met, Leu or Nle
HSQGTFTSDYSRYLDSRRAQDFVKWLXDT

SEQ ID NO: 820 - protein, 10 aa, Artificial Sequence
  Synthetic peptide
  MISC_FEATURE: Peptide fragment representing carboxy terminal 10 amino acids of Exendin-4
GPSSGAPPPS

SEQ ID NO: 821 - protein, 8 aa, Artificial Sequence
  Synthetic peptide
  MISC_FEATURE: Peptide fragment representing the carboxy terminal 8 amino acids of oxyntomodulin
KRNRNNIA

SEQ ID NO: 822 - protein, 4 aa, Artificial Sequence
  Synthetic peptide
  MISC_FEATURE: Peptide fragment representing the amino 4 amino acids of oxyntomodulin carboxy terminus of SEQ ID NO: 21
KRNR

SEQ ID NO: 823 - protein, 10 aa, Artificial Sequence
  Synthetic peptide
  MISC_FEATURE: Peptide fragment representing the carboxy terminal 10 amino acids of Exendin-4
  MOD_RES (10)..(10): AMIDATION
GPSSGAPPPS

SEQ ID NO: 824 - protein, 39 aa, Artificial Sequence
  Glucagon analogue
HSQGTFTSDYSKYLDSRRAQDFVQWLMDTGPSSGAPPPS

SEQ ID NO: 825 - protein, 37 aa, Artificial Sequence
  Glucagon analogue
HSQGTFTSDYSKYLDSRRAQDFVQWLMDTKRNRNNIA

SEQ ID NO: 826 - protein, 33 aa, Artificial Sequence
  Glucagon analogue
HSQGTFTSDYSKYLDSRRAQDFVQWLMDTKRNR

SEQ ID NO: 827 - protein, 29 aa, Artificial Sequence
  Glucagon analogue
HSQGTFTSDYSKYLDSCRAQDFVQWLMNT

SEQ ID NO: 828 - protein, 39 aa, Artificial Sequence; identical to SEQ ID NO: 36
  Synthetic peptide

SEQ ID NO: 829 - protein, 29 aa, Artificial Sequence
  Glucagon analogue
  MOD_RES (24)..(24): 2-butyrolactone bound through Cys thiol group
HSQGTFTSDYSKYLDSRRAQDFVQWLMNT

SEQ ID NO: 830 - protein, 29 aa, Artificial Sequence
  Glucagon analogue
  MOD_RES (24)..(24): Carboxymethyl group bound through Cys thiol group
HSQGTFTSDYSKYLDSRRAQDFVQWLMNT

SEQ ID NO: 831 - protein, 39 aa, Artificial Sequence; identical to SEQ ID NO: 36
  Glucagon analogue

SEQ ID NO: 832 - protein, 30 aa, Artificial Sequence
  Glucagon analog
  MOD_RES (30)..(30): Xaa is Asp, Glu, Lys, Arg or His
HSQGTFTSDYSKYLDSRRAQDFVQWLMDTX

SEQ ID NO: 833 - protein, 29 aa, Artificial Sequence
  Glucagon analogue
  MOD_RES (15)..(15): Xaa is Asp, Glu, cysteic acid, homoglutamic acid or homocysteic acid
  MOD_RES (27)..(27): Xaa is Met, Leu or Nle
  MOD_RES (28)..(28): Xaa is Asn, Lys, Arg, His, Asp or Glu
  MOD_RES (29)..(29): Xaa is Thr, Lys, Arg, His, Asp or Glu
HSQGTFTSDYSKYLXSRRAQDFVQWLXXX

SEQ ID NO: 834 - protein, 29 aa, Artificial Sequence
  Glucagon analogue
  MOD_RES (15)..(15): Xaa is Asp, Glu, cysteic acid, homoglutamic acid or homocysteic acid
  MOD_RES (27)..(27): Xaa is Met, Leu or Nle
  MOD_RES (28)..(28): Xaa is Asn or an acidic amino acid
  MOD_RES (29)..(29): Xaa is Thr or an acidic amino acid
HSQGTFTSDYSKYLXSRRAQDFVQWLXXX

SEQ ID NO: 835 - protein, 39 aa, Artificial Sequence
  Synthetic peptide
HSQGTFTSDYSKYLDSRRAQDFVQWLMETGPSSGAPPPS

SEQ ID NO: 836 - protein, 37 aa, Artificial Sequence
  Glucagon analogue
HSQGTFTSDYSKYLDSRRAQDFVQWLMETKRNRNNIA

SEQ ID NO: 837 - protein, 33 aa, Artificial Sequence
  Glucagon analogue
HSQGTFTSDYSKYLDSRRAQDFVQWLMETKRNR

SEQ ID NO: 838 - protein, 29 aa, Artificial Sequence
  Glucagon analogue
HSQGTFTSDYSKYLDSRRAQDFVQWLMET

SEQ ID NO: 839 - protein, 27 aa, Artificial Sequence
  Synthetic peptide
  MOD_RES (1)..(1): Xaa is any amino acid
  MOD_RES (2)..(2): Xaa is any amino acid
  MOD_RES (27)..(27): Met comprises Z
XXQGTFTSDYSKYLDSRRAQDFVQWLM

SEQ ID NO: 840 - protein, 29 aa, Artificial Sequence
  Synthetic peptide
  MOD_RES (1)..(1): Xaa is alpha, alpha-dimethyl imidiazole acetic acid (DMIA)
  MISC_FEATURE (16)..(20): Lactam bridge between residues 16 and 20
  MOD_RES (24)..(24): Pegylation
XSQGTFTSDYSKYLDERRAKDFVCWLMNT

SEQ ID NO: 841 - protein, 29 aa, Artificial Sequence
  Synthetic peptide
  MOD_RES (1)..(1): Xaa is alpha, alpha-dimethyl imidiazole acetic acid (DMIA)
  MISC_FEATURE (16)..(20): Lactam bridge between residues 16 and 20
  MOD_RES (24)..(24): Glutamine to alanine mutation
  MOD_RES (29)..(29): Pegylation
XSQGTFTSDYSKYLDERRAKDFVAWLMNC

SEQ ID NO: 842 - protein, 29 aa, Artificial Sequence
  Synthetic peptide
  MOD_RES (1)..(1): Xaa is alpha, alpha-dimethyl imidiazole acetic acid (DMIA)
  MISC_FEATURE (16)..(20): Lactam bridge between residues 16 and 20
  MOD_RES (24)..(24): Pegylation
  MOD_RES (27)..(27): Xaa is Nle or Leu
XSQGTFTSDYSKYLDERRAKDFVCWLXNT

SEQ ID NO: 843 - protein, 29 aa, Artificial Sequence
  Synthetic peptide
  MOD_RES (1)..(1): Xaa is alpha, alpha-dimethyl imidiazole acetic acid (DMIA)
  MISC_FEATURE (16)..(20): Lactam bridge between residues 16 and 20
  MISC_FEATURE (24)..(24): Glutamine to alanine mutation
  MISC_FEATURE (27)..(27): Xaa is Nle or Leu
  MOD_RES (29)..(29): Pegylation
XSQGTFTSDYSKYLDERRAKDFVAWLXNC

SEQ ID NO: 844 - protein, 29 aa, Artificial Sequence
  Synthetic peptide
  MISC_FEATURE: SEQ ID NO: 1 with  Ala 20, Ala 24, Nle 27, and Asp 28
  MOD_RES (27)..(27): Xaa is Nle
HSQGTFTSDYSKYLDSRRAADFVAWLXDT

SEQ ID NO: 845 - protein, 29 aa, Artificial Sequence
  Synthetic peptide
  MISC_FEATURE: SEQ ID NO: 1 with Ala 20, Ala 24, Nle27 , Asp 28, and Glu 29
  MOD_RES (27)..(27): Xaa is Nle
HSQGTFTSDYSKYLDSRRAADFVAWLXDE

SEQ ID NO: 846 - protein, 30 aa, Artificial Sequence
  Synthetic peptide
  MISC_FEATURE: SEQ ID NO: 1 with Ala 20, Ala 24, Nle 27, Asp 28, and Glu 30
  MOD_RES (27)..(27): Xaa is Nle
HSQGTFTSDYSKYLDSRRAADFVAWLXDTE

SEQ ID NO: 847 - protein, 29 aa, Artificial Sequence
  Synthetic peptide
  MISC_FEATURE: SEQ ID NO: 1 with Ala 20, Ala 24, Nle 27, Glu 28, and Glu 29
  MOD_RES (27)..(27): Xaa is Nle
HSQGTFTSDYSKYLDSRRAADFVAWLXEE

SEQ ID NO: 848 - protein, 30 aa, Artificial Sequence
  Synthetic peptide
  MISC_FEATURE: SEQ ID NO: 1 with Ala 20, Ala 24, Nle 27, Glu 28, and Glu 30
  MOD_RES (27)..(27): Xaa is Nle
HSQGTFTSDYSKYLDSRRAADFVAWLXETE

SEQ ID NO: 849 - protein, 30 aa, Artificial Sequence
  Synthetic peptide
  MOD_RES (27)..(27): Xaa is Nle
  MISC_FEATURE (27)..(27): SEQ ID NO: 1 with Ala 20, Ala 24, Nle 27, Glu 29, and Glu 30
HSQGTFTSDYSKYLDSRRAADFVAWLXNEE

SEQ ID NO: 850 - protein, 29 aa, Artificial Sequence
  Synthetic peptide
  MISC_FEATURE: SEQ ID NO: 1 with Ala 20, Glu 21, Ala 24, Nle 27, and Asp 28
  MOD_RES (27)..(27): Xaa is Nle
HSQGTFTSDYSKYLDSRRAAEFVAWLXDT

SEQ ID NO: 851 - protein, 29 aa, Artificial Sequence
  Synthetic peptide
  MISC_FEATURE: SEQ ID NO: 1 with Ala 20, Glu 21, Ala 24, Nle 27, Asp 28, and Glu 29
  MOD_RES (27)..(27): Xaa is Nle
HSQGTFTSDYSKYLDSRRAAEFVAWLXDE

SEQ ID NO: 852 - protein, 29 aa, Artificial Sequence
  Synthetic peptide
  MISC_FEATURE: SEQ ID NO: 1 with Ala 20, Glu 21, Ala 24, Nle 27, Asp 28, and Glu 30
  MOD_RES (27)..(27): Xaa is Nle
HSQGTFTSDYSKYLDSRRAAEFVAWLXDE

SEQ ID NO: 853 - protein, 29 aa, Artificial Sequence
  Synthetic peptide
  MISC_FEATURE: SEQ ID NO :1 with Ala 20, Glu 21, Ala 24, Nle 27, Glu 28, and Glu 29
  MOD_RES (27)..(27): Xaa is Nle
HSQGTFTSDYSKYLDSRRAAEFVAWLXEE

SEQ ID NO: 854 - protein, 29 aa, Artificial Sequence
  Synthetic peptide
  MISC_FEATURE: SEQ ID NO: 1 with Ala 20, Glu 21, Ala 24, Nle 27, Glu 28, and Glu 30
HSQGTFTSDYSKYLDSRRAQDFVQWLMNT

SEQ ID NO: 855 - protein, 30 aa, Artificial Sequence
  Synthetic peptide
  MISC_FEATURE: SEQ ID NO: 1 with Ala 20, Glu 21, Ala 24, Nle 27, Glu 29, and Glu 30
  MOD_RES (27)..(27): Xaa is Nle
HSQGTFTSDYSKYLDSRRAAEFVAWLXNEE

SEQ ID NO: 856 - protein, 29 aa, Artificial Sequence
  Synthetic peptide
  MISC_FEATURE: SEQ ID NO: 1 with Thr 16, Ala 20, Glu 21, Ala 24, Nle 27, Asp 28, and Glu29
  MOD_RES (27)..(27): Xaa is Nle
HSQGTFTSDYSKYLDTRRAAEFVAWLXDE

SEQ ID NO: 857 - protein, 31 aa, Homo sapiens; identical to SEQ ID NO: 50

SEQ ID NO: 858 - protein, 30 aa, Homo sapiens; identical to SEQ ID NO: 52
  MOD_RES (30)..(30): AMIDATION

SEQ ID NO: 859 - protein, 29 aa, Artificial Sequence
  Synthetic peptide
  MOD_RES (3)..(3): Xaa is Glutamine analog
  MOD_RES (27)..(27): Xaa is Nle
HSXGTFTSDYSKYLDTRRAAEFVAWLXDE

SEQ ID NO: 860 - protein, 29 aa, Artificial Sequence
  Synthetic peptide
  MOD_RES (3)..(3): Xaa is Glutamine analog
  MOD_RES (16)..(16): Xaa is Aminoisobutryic acid
HSXGTFTSDYSKYLDXRRAADFVAWLMDE

SEQ ID NO: 861 - protein, 29 aa, Artificial Sequence
  Synthetic peptide
  MOD_RES (27)..(27): Xaa is Nle
HSQGTFTSDYSKYLDTRRAAEFVAWLXDE

SEQ ID NO: 862 - protein, 29 aa, Artificial Sequence
  Synthetic peptide
  MOD_RES (3)..(3): Xaa is Acetamidomethyl-cysteine
  MOD_RES (27)..(27): Xaa is Nle
HSXGTFTSDYSKYLDTRRAAEFVAWLXDE

SEQ ID NO: 863 - protein, 29 aa, Artificial Sequence
  Synethic peptide
  MOD_RES (3)..(3): Xaa is Acetyldiaminobutanoic acid
  MOD_RES (27)..(27): Xaa is Nle
HSXGTFTSDYSKYLDTRRAAEFVAWLXDE

SEQ ID NO: 864 - protein, 29 aa, Artificial Sequence
  Synthetic peptide
  MOD_RES (3)..(3): Xaa is Carbamoyldiaminopropanoic acid
  MOD_RES (27)..(27): Xaa is Nle
HSXGTFTSDYSKYLDTRRAAEFVAWLXDE

SEQ ID NO: 865 - protein, 29 aa, Artificial Sequence
  Synthetic peptide
  MOD_RES (3)..(3): Xaa is Methylglutamine
  MOD_RES (27)..(27): Xaa is Nle
HSXGTFTSDYSKYLDTRRAAEFVAWLXDE

SEQ ID NO: 866 - protein, 29 aa, Artificial Sequence
  Synthetic peptide
  MOD_RES (3)..(3): Xaa is Methionine sulfoxide
  MOD_RES (27)..(27): Xaa is Nle
HSXGTFTSDYSKYLDTRRAAEFVAWLXDE

SEQ ID NO: 867 - protein, 29 aa, Artificial Sequence
  Synthetic peptide
  MOD_RES (3)..(3): Xaa is Acetylornithine
  MOD_RES (27)..(27): Xaa is Nle
HSXGTFTSDYSKYLDTRRAAEFVAWLXDE

SEQ ID NO: 868 - protein, 29 aa, Artificial Sequence
  Synthetic peptide
  MOD_RES (16)..(16): Xaa is Aminoisobutryic acid
HSQGTFTSDYSKYLDXRRAADFVAWLMDE

SEQ ID NO: 869 - protein, 29 aa, Artificial Sequence
  Synthetic peptide
  MOD_RES (3)..(3): Xaa is Acetyldiaminobutanoic acid
  MOD_RES (16)..(16): Xaa is Aminoisobutryic acid
HSXGTFTSDYSKYLDXRRAADFVAWLMDE

SEQ ID NO: 870 - protein, 29 aa, Artificial Sequence
  Synthetic peptide
  MOD_RES (3)..(3): Xaa is Methylglutamine
  MOD_RES (16)..(16): Xaa is Aib
HSXGTFTSDYSKYLDXRRAADFVAWLMDE

SEQ ID NO: 871 - protein, 29 aa, Artificial Sequence
  Synthetic peptide
  MOD_RES (3)..(3): Xaa is acetyldiaminobutanoic acid
  MOD_RES (16)..(16): Xaa is Aib
HSXGTFTSDYSKYLDXRRAADFVAWLLDE

SEQ ID NO: 872 - protein, 39 aa, Artificial Sequence; identical to SEQ ID NO: 604
  Synthetic peptide
  MOD_RES (3)..(3): Xaa is Acetyldiaminobutanoic acid
  MOD_RES (16)..(16): Aminoisobutryic Acid
  MOD_RES (39)..(39): AMIDATION

SEQ ID NO: 873 - protein, 29 aa, Artificial Sequence
  Synthetic peptide
  MOD_RES (3)..(3): Xaa is Acetyldiaminobutanoic acid
  MOD_RES (16)..(16): Xaa is Aminoisobutryric acid
HSXGTFTSDYSKYLDXRRASDFVSWLLDE

SEQ ID NO: 874 - protein, 29 aa, Artificial Sequence
  Synthetic peptide
  MOD_RES (3)..(3): Xaa is Acetyldiaminobutanoic acid
  MOD_RES (16)..(16): Xaa is Aminoisobutryic acid
HSXGTFTSDYSKYLDXRRATDFVTWLLDE

SEQ ID NO: 875 - protein, 29 aa, Artificial Sequence
  Synthetic peptide
HSQGTFTSDYSKYLDSRRAQDFVQWLMDE

SEQ ID NO: 876 - protein, 29 aa, Artificial Sequence
  Synthetic peptide
  MOD_RES (16)..(16): Xaa is Aib
HSQGTFTSDYSKYLDXRRAQDFVQWLMDE

SEQ ID NO: 877 - protein, 29 aa, Artificial Sequence
  Synthetic peptide
  misc_feature (3)..(3): Xaa can be any naturally occurring amino acid
HSXGTFTSDYSKYLDSRRAQDFVQWLMNT

SEQ ID NO: 878 - protein, 29 aa, Artificial Sequence
  Synthetic peptide
HSQGTFTSDYSKYLDSRRAQDFVQWLMDT

SEQ ID NO: 879 - protein, 30 aa, Artificial Sequence; identical to SEQ ID NO: 581
  Synthetic peptide
  MOD_RES (2)..(2): Xaa is d-Ser
  MOD_RES (30)..(30): Acylated with a C14 fatty acyl group
  MOD_RES (30)..(30): AMIDATION

SEQ ID NO: 880 - protein, 29 aa, Artificial Sequence
  Synthetic peptide
  MOD_RES (2)..(2): Xaa is d-Ser
  MOD_RES (10)..(10): Acylated with a C14 fatty acyl group
  MOD_RES (29)..(29): AMIDATION
HXQGTFTSDKSKYLDERRAKDFVQWLMNT

SEQ ID NO: 881 - protein, 30 aa, Artificial Sequence; identical to SEQ ID NO: 581
  Synthetic peptide
  MOD_RES (2)..(2): Xaa is d-Ser
  MOD_RES (30)..(30): Acylated with a C16 fatty acyl group
  MOD_RES (30)..(30): AMIDATION

SEQ ID NO: 882 - protein, 29 aa, Artificial Sequence
  Synthetic peptide
  MOD_RES (2)..(2): Xaa is d-Ser
  MOD_RES (10)..(10): Acylated with a C16 fatty acyl group
  MOD_RES (29)..(29): AMIDATION
HXQGTFTSDKSKYLDERRAKDFVQWLMNT

SEQ ID NO: 883 - protein, 29 aa, Artificial Sequence
  Synthetic peptide
  MOD_RES (2)..(2): Aminoisobutryic Acid
  MOD_RES (10)..(10): Acylated with a C18 fatty acyl group
  MOD_RES (24)..(24): Cys-PEG
  MOD_RES (29)..(29): AMIDATION
HXQGTFTSDKSKYLDEQAAKEFICWLMNT

SEQ ID NO: 884 - protein, 30 aa, Artificial Sequence; identical to SEQ ID NO: 586
  Synthetic peptide
  MOD_RES (2)..(2): Aminoisobutryic Acid
  MOD_RES (24)..(24): Cys-PEG
  MOD_RES (30)..(30): Acylated with a C18 fatty acyl group
  MOD_RES (30)..(30): AMIDATION

SEQ ID NO: 885 - protein, 29 aa, Artificial sequence
  Synthetic peptide
  MOD_RES (16)..(16): Xaa is Ser or alpha, alpha-disubstituted amino acid
  MOD_RES (20)..(20): Xaa is Gln or alpha, alpha-disubstituted amino acid
  MOD_RES (21)..(21): Xaa is Asp or alpha, alpha-disubstituted amino acid
  MOD_RES (24)..(24): Xaa is Gln or alpha, alpha-disubstituted amino acid
HSQGTFTSDYSKYLDXRRAXXFVXWLMNT

SEQ ID NO: 886 - protein, 29 aa, Artificial Sequence
  Synthetic peptide
  MOD_RES (16)..(16): Xaa is Aib
HSQGTFTSDYSKYLDXRRAQDFVQWLMNT

SEQ ID NO: 887 - protein, 29 aa, Artificial Sequence
  Synthetic peptide
  MOD_RES (19)..(19): Xaa is Aib
HSQGTFTSDYSKYLDSRRXQDFVQWLMNT

SEQ ID NO: 888 - protein, 29 aa, Artificial Sequence
  Synthetic peptide
  MOD_RES (20)..(20): Xaa is Aib
HSQGTFTSDYSKYLDSRRAXDFVQWLMNT

SEQ ID NO: 889 - protein, 29 aa, Artificial Sequence
  Synthetic peptide
  MOD_RES (21)..(21): Xaa is Aib
HSQGTFTSDYSKYLDSRRAQXFVQWLMNT

SEQ ID NO: 890 - protein, 29 aa, Artificial Sequence
  Synthetic peptide
  MOD_RES (24)..(24): Xaa is Aib
HSQGTFTSDYSKYLDSRRAQDFVXWLMNT

SEQ ID NO: 891 - protein, 29 aa, Artificial Sequence
  Synthetic peptide
  MOD_RES (16)..(16): Xaa is Aib
  MOD_RES (20)..(20): Xaa is Aib
HSQGTFTSDYSKYLDXRRAXDFVQWLMNT

SEQ ID NO: 892 - protein, 29 aa, Artificial Sequence
  Synthetic peptide
  MOD_RES (16)..(16): Xaa is Aib
  MOD_RES (24)..(24): Xaa is Aib
HSQGTFTSDYSKYLDXRRAQDFVXWLMNT

SEQ ID NO: 893 - protein, 29 aa, Artificial Sequence
  Synthetic peptide
  MOD_RES (20)..(20): Xaa is Aib
  MOD_RES (24)..(24): Xaa is Aib
HSQGTFTSDYSKYLDSRRAXDFVXWLMNT

SEQ ID NO: 894 - protein, 29 aa, Artificial Sequence
  Synthetic peptide
  MOD_RES (16)..(16): Xaa is Aib
  MOD_RES (20)..(20): Xaa is Aib
  MOD_RES (24)..(24): Xaa is Aib
HSQGTFTSDYSKYLDXRRAXDFVXWLMNT

SEQ ID NO: 895 - protein, 29 aa, Artificial Sequence
  Synthetic peptide
  MOD_RES (2)..(2): Xaa is Aib
  MOD_RES (16)..(16): Xaa is Aib
  MOD_RES (29)..(29): AMIDATION
HXQGTFTSDKSKYLDXRRAQDFVQWLMNT

SEQ ID NO: 896 - protein, 29 aa, Artificial Sequence
  Synthetic peptide
  MOD_RES (2)..(2): Xaa is Aib
  MOD_RES (16)..(16): Xaa is Aib
  MOD_RES (29)..(29): AMIDATION
HXQGTFTSDYSKYLDXRRAQDFVQWLMNT

SEQ ID NO: 897 - protein, 29 aa, Artificial Sequence
  Synthetic peptide
  MOD_RES (2)..(2): Xaa is Aib
  MOD_RES (10)..(10): Acylated with a C16 fatty acyl group
  MOD_RES (16)..(16): Xaa is Aib
  MOD_RES (29)..(29): AMIDATION
HXQGTFTSDKSKYLDXRRAQDFVQWLMNT

SEQ ID NO: 898 - protein, 29 aa, Artificial Sequence
  Synthetic peptide
  MOD_RES (2)..(2): Xaa is Aib
  MOD_RES (10)..(10): Acylated with a C16 fatty acyl group via Ala-Ala spacer
  MOD_RES (16)..(16): Xaa is Aib
  MOD_RES (29)..(29): AMIDATION
HXQGTFTSDKSKYLDXRRAQDFVQWLMNT

SEQ ID NO: 899 - protein, 29 aa, Artificial Sequence
  Synthetic peptide
  MOD_RES (2)..(2): Xaa is Aib
  MOD_RES (10)..(10): Acylated with a C16 fatty acyl group via dipeptide spacer
  MOD_RES (16)..(16): Xaa is Aib
  MOD_RES (29)..(29): AMIDATION
HXQGTFTSDKSKYLDXRRAQDFVQWLMNT

SEQ ID NO: 900 - protein, 29 aa, Artificial Sequence
  Synthetic peptide
  MOD_RES (2)..(2): Xaa is Aib
  MOD_RES (10)..(10): Acylated with a C16 fatty acyl group via beta-Ala-beta-Ala spacer
  MOD_RES (16)..(16): Xaa is Aib
  MOD_RES (29)..(29): AMIDATION
HXQGTFTSDKSKYLDXRRAQDFVQWLMNT

SEQ ID NO: 901 - protein, 29 aa, Artificial Sequence
  Synthetic peptide
  MOD_RES (2)..(2): Xaa is Aib
  MOD_RES (10)..(10): Acylated with a C16 fatty acyl group via 6-aminohexanoic acid spacer
  MOD_RES (16)..(16): Xaa is Aib
  MOD_RES (29)..(29): AMIDATION
HXQGTFTSDKSKYLDXRRAQDFVQWLMNT

SEQ ID NO: 902 - protein, 29 aa, Artificial Sequence
  Synthetic peptide
  MOD_RES (2)..(2): Xaa is Aib
  MOD_RES (10)..(10): Acylated with a C16 fatty acyl group via Leu-Leu spacer
  MOD_RES (16)..(16): Xaa is Aib
  MOD_RES (29)..(29): AMIDATION
HXQGTFTSDKSKYLDXRRAQDFVQWLMNT

SEQ ID NO: 903 - protein, 29 aa, Artificial Sequence
  Synthetic peptide
  MOD_RES (2)..(2): Xaa is Aib
  MOD_RES (10)..(10): Acylated with a C16 fatty acyl group via Pro-Pro spacer
  MOD_RES (16)..(16): Xaa is Aib
  MOD_RES (29)..(29): AMIDATION
HXQGTFTSDKSKYLDXRRAQDFVQWLMNT

SEQ ID NO: 904 - protein, 29 aa, Artificial Sequence
  Synthetic peptide
  MOD_RES (2)..(2): Xaa is Aib
  MOD_RES (10)..(10): Acylated with a C14 fatty acyl group
  MOD_RES (16)..(16): Xaa is Aib
  MOD_RES (24)..(24): Cys-PEG
  MOD_RES (29)..(29): AMIDATION
HXQGTFTSDKSKYLDXRRAQDFVCWLMNT

SEQ ID NO: 905 - protein, 29 aa, Artificial Sequence
  Synthetic peptide
  MOD_RES (2)..(2): Xaa is Aib
  MOD_RES (10)..(10): Acylated with a C14 fatty acyl group via dipeptide spacer
  MOD_RES (16)..(16): Xaa is Aib
  MOD_RES (24)..(24): Cys-PEG
  MOD_RES (29)..(29): AMIDATION
HXQGTFTSDKSKYLDXRRAQDFVCWLMNT

SEQ ID NO: 906 - protein, 29 aa, Artificial Sequence
  Synthetic peptide
  MOD_RES (2)..(2): Xaa is Aib
  MOD_RES (10)..(10): Acylated with a C14 fatty acyl group via dipeptide spacer
  MOD_RES (16)..(16): Xaa is Aib
  MOD_RES (29)..(29): AMIDATION
HXQGTFTSDKSKYLDXRRAQDFVQWLMNT

SEQ ID NO: 907 - protein, 29 aa, Artificial Sequence
  Synthetic peptide
  MOD_RES (2)..(2): Xaa is Aib
  MOD_RES (10)..(10): Acylated with a C14 fatty acyl group via Ala-Ala spacer
  MOD_RES (16)..(16): Xaa is Aib
  MOD_RES (24)..(24): Cys-PEG
  MOD_RES (29)..(29): AMIDATION
HXQGTFTSDKSKYLDXRRAQDFVCWLMNT

SEQ ID NO: 908 - protein, 29 aa, Artificial Sequence
  Synthetic peptide
  MOD_RES (2)..(2): Xaa is Aib
  MOD_RES (10)..(10): Acylated with a C14 fatty acyl group via Ala-Ala spacer
  MOD_RES (16)..(16): Xaa is Aib
  MOD_RES (29)..(29): AMIDATION
HXQGTFTSDKSKYLDXRRAQDFVQWLMNT

SEQ ID NO: 909 - protein, 29 aa, Artificial Sequence
  Synthetic peptide
  MOD_RES (2)..(2): Xaa is Aib
  MOD_RES (10)..(10): Acylated with a C16 fatty acyl group via Ala-Ala spacer
  MOD_RES (16)..(16): Xaa is Aib
  MOD_RES (24)..(24): Cys-PEG
  MOD_RES (29)..(29): AMIDATION
HXQGTFTSDKSKYLDXRRAQDFVCWLMNT

SEQ ID NO: 910 - protein, 29 aa, Artificial Sequence
  Synthetic peptide
  MOD_RES (2)..(2): Xaa is Aib
  MOD_RES (10)..(10): Acylated with a C16 fatty acyl group via dipeptide spacer
  MOD_RES (16)..(16): Xaa is Aib
  MOD_RES (24)..(24): Cys-PEG
  MOD_RES (29)..(29): AMIDATION
HXQGTFTSDKSKYLDXRRAQDFVCWLMNT

SEQ ID NO: 911 - protein, 29 aa, Artificial Sequence
  Synthetic peptide
  MOD_RES (2)..(2): Xaa is Aib
  MOD_RES (10)..(10): Covalently bound to a C14 fatty acyl group
  MOD_RES (16)..(16): Xaa is Aib
  MOD_RES (29)..(29): AMIDATION
HXQGTFTSDKSKYLDXRRAQDFVCWLMNT

SEQ ID NO: 912 - protein, 29 aa, Artificial Sequence
  Synthetic peptide
  MOD_RES (2)..(2): Xaa is Aib
  MOD_RES (10)..(10): Covalently bound to C14 fatty acyl group via dipeptide spacer
  MOD_RES (16)..(16): Xaa is Aib
  MOD_RES (29)..(29): AMIDATION
HXQGTFTSDKSKYLDXRRAQDFVCWLMNT

SEQ ID NO: 913 - protein, 29 aa, Artificial Sequence
  Synthetic peptide
  MOD_RES (2)..(2): Xaa is Aib
  MOD_RES (10)..(10): Covalently bound to C14 fatty acyl group via Ala-Ala spacer
  MOD_RES (16)..(16): Xaa is Aib
  MOD_RES (29)..(29): AMIDATION
HXQGTFTSDKSKYLDXRRAQDFVCWLMNT

SEQ ID NO: 914 - protein, 29 aa, Artificial Sequence
  Synthetic peptide
  MOD_RES (2)..(2): Xaa is Aib
  MOD_RES (10)..(10): Covalently bound to C16 fatty acyl group via dipeptide spacer
  MOD_RES (16)..(16): Xaa is Aib
  MOD_RES (29)..(29): AMIDATION
HXQGTFTSDKSKYLDXRRAQDFVCWLMNT

SEQ ID NO: 915 - protein, 29 aa, Artificial Sequence
  Synthetic peptide
  MOD_RES (2)..(2): Xaa is Aib
  MOD_RES (10)..(10): Covelently bound to C16 fatty acyl group via Ala-Ala spacer
  MOD_RES (16)..(16): Xaa is Aib
  MOD_RES (29)..(29): AMIDATION
HXQGTFTSDKSKYLDXRRAQDFVCWLMNT

SEQ ID NO: 916 - protein, 30 aa, Artificial Sequence; identical to SEQ ID NO: 581
  Synthetic peptide
  MOD_RES (2)..(2): D-serine, D-alanine, valine, amino n-butyric acid, glycine, N-methyl serine, aminoisobutyric acid
  MOD_RES (30)..(30): Acylated with a C14 fatty acyl group
  MOD_RES (30)..(30): AMIDATION

SEQ ID NO: 917 - protein, 29 aa, Artificial Sequence
  Synthetic peptide
  MOD_RES (2)..(2): D-serine, D-alanine, valine, amino n-butyric acid, glycine, N-methyl serine, aminoisobutyric acid
  MOD_RES (10)..(10): Acylated with a C14 fatty acyl group
  MOD_RES (29)..(29): AMIDATION
HXQGTFTSDKSKYLDERRAKDFVQWLMNT

SEQ ID NO: 918 - protein, 30 aa, Artificial Sequence; identical to SEQ ID NO: 581
  Synthetic peptide
  MOD_RES (2)..(2): D-serine, D-alanine, valine, amino n-butyric acid, glycine, N-methyl serine, aminoisobutyric acid
  MOD_RES (30)..(30): Acylated with a C16 fatty acyl group
  MOD_RES (30)..(30): AMIDATION

SEQ ID NO: 919 - protein, 29 aa, Artificial Sequence
  Synthetic peptide
  MOD_RES (2)..(2): D-serine, D-alanine, valine, amino n-butyric acid, glycine, N-methyl serine, aminoisobutyric acid
  MOD_RES (10)..(10): Acylated with a C16 fatty acyl group
  MOD_RES (29)..(29): AMIDATION
HXQGTFTSDKSKYLDERRAKDFVQWLMNT

SEQ ID NO: 920-1000 - skipped (81 entries)

SEQ ID NO: 1001 - protein, 29 aa, Homo sapiens
  MISC_FEATURE: Wild type glucagon
HSQGTFTSDYSKYLDSRRAQDFVQWLMNT

SEQ ID NO: 1002 - protein, 31 aa, Homo sapiens; identical to SEQ ID NO: 50
  MISC_FEATURE (1)..(31): GLP-1(7-37)

SEQ ID NO: 1003 - protein, 30 aa, Artificial sequence; identical to SEQ ID NO: 52
  Synthetic polypeptide
  MISC_FEATURE (1)..(30): GLP-1(7-36) amidated
  MISC_FEATURE (30)..(30): C-terminal amidation

SEQ ID NO: 1004 - protein, 42 aa, Homo sapiens
  mat_peptide (1)..(42): gastric inhibitory polypeptide
YAEGTFISDYSIAMDKIHQQDFVNWLLAQKGKKNDWKHNITQ

SEQ ID NO: 1005 - protein, 29 aa, Artificial sequence
  Synthetic polypeptide
  MISC_FEATURE: Analog 61
  MISC_FEATURE (16)..(20): Lactam bridge between residues 16 and 20.
HSQGTFTSDYSKYLDEIHQKEFIAWLMNT

SEQ ID NO: 1006 - protein, 29 aa, Artificial sequence
  Synthetic polypeptide
  MISC_FEATURE: Analog 62
  MISC_FEATURE (16)..(20): Lactam bridge between residues 16 and 20.
HSQGTFTSDYSIYLDEIHQKEFIAWLMNT

SEQ ID NO: 1007 - protein, 29 aa, Artificial sequence
  Synthetic polypeptide
  MISC_FEATURE: Analog 63
  MISC_FEATURE (12)..(16): Lactam bridge between residues 12 and 16.
HSQGTFTSDYSKYLDEIHQKEFIAWLMNT

SEQ ID NO: 1008 - protein, 29 aa, Artificial sequence
  Synthetic polypeptide
  MISC_FEATURE: Analog 66
HSQGTFTSDYSKYLDEIHQKEFIAWLLAQ

SEQ ID NO: 1009 - protein, 29 aa, Artificial sequence
  Synthetic polypeptide
  MISC_FEATURE: Analog 68
HSQGTFTSDYSKYLDKIHQEEFIAWLMNT

SEQ ID NO: 1010 - protein, 29 aa, Artificial sequence
  Synthetic polypeptide
  MISC_FEATURE: Analog 69
  MISC_FEATURE (16)..(20): Lactam bridge between residues 16 and 20
HSQGTFTSDYSKYLDKIHQEEFIAWLMNT

SEQ ID NO: 1011 - protein, 29 aa, Artificial sequence
  Synthetic polypeptide
  MISC_FEATURE: Analog 84
  MISC_FEATURE (16)..(20): Lactam bridge between residues 16 and 20
HSQGTFTSDYSIYLDEIHQKEFICWLLAQ

SEQ ID NO: 1012 - protein, 29 aa, Artificial sequence
  Synthetic polypeptide
  MISC_FEATURE: Analog 85
  MISC_FEATURE (16)..(20): Lactam bridge between residues 16 and 20
  MISC_FEATURE (24)..(24): PEG (20kDa) covalently attached to Cysteine
HSQGTFTSDYSIYLDEIHQKEFICWLLAQ

SEQ ID NO: 1013 - protein, 29 aa, Artificial sequence
  Synthetic polypeptide
  MISC_FEATURE: Analog 92
HSQGTFTSDYSIYLDEKHQKEFIAWLLAQ

SEQ ID NO: 1014 - protein, 29 aa, Artificial sequence
  Synthetic polypeptide
  MISC_FEATURE: Analog 93
  MISC_FEATURE (16)..(20): Lactam bridge between residues 16 and 20
  MISC_FEATURE (17)..(21): Lactam bridge between residues 17 and 21
HSQGTFTSDYSIYLDEKHQKEFIAWLLAQ

SEQ ID NO: 1015 - protein, 29 aa, Artificial sequence
  Synthetic polypeptide
  MISC_FEATURE: Analog 95
  MISC_FEATURE (16)..(20): Lactam bridge between residues 16 and 20
HAEGTFISDYSIAMDEIHQKDFVNWLLAQ

SEQ ID NO: 1016 - protein, 29 aa, Artificial sequence
  Synthetic polypeptide
  MISC_FEATURE: Analog 96
  MISC_FEATURE (16)..(20): Lactam bridge between residues 16 and 20
YAEGTFISDYSIAMDEIHQKDFVNWLLAQ

SEQ ID NO: 1017 - protein, 29 aa, Artificial sequence
  Synthetic polypeptide
  MISC_FEATURE: Analog 97
  MISC_FEATURE (16)..(20): Lactam bridge between residues 16 and 20
HAEGTFTSDYSIYMDEIHQKDFVNWLLAQ

SEQ ID NO: 1018 - protein, 29 aa, Artificial sequence
  Synthetic polypeptide
  MISC_FEATURE: Analog 98
  MISC_FEATURE (16)..(20): Lactam bridge between residues 16 and 20
YAEGTFTSDYSIYMDEIHQKDFVNWLLAQ

SEQ ID NO: 1019 - protein, 42 aa, Artificial sequence
  Synthetic polypeptide
  MISC_FEATURE: Analog 99
YAEGTFISDYSIAMDKIHQQDFVNWLLAQKGKKNWLKHNITQ

SEQ ID NO: 1020 - protein, 42 aa, Artificial sequence
  Synthetic polypeptide
  MISC_FEATURE: Analog 100
  MOD_RES (2)..(2): Xaa is Aib
YXEGTFISDYSIAMDKIHQQDFVNWLLAQKGKKNWLKHNITQ

SEQ ID NO: 1021 - protein, 42 aa, Artificial sequence
  Synthetic polypeptide
  MISC_FEATURE: Analog 101
YAPGTFISDYSIAMDKIHQQDFVNWLLAQKGKKNWLKHNITQ

SEQ ID NO: 1022 - protein, 42 aa, Artificial sequence
  Synthetic polypeptide
  MISC_FEATURE: Analog 102
  MOD_RES (2)..(2): Xaa is Aib
YXEGTFISDYSIAMDKIHQQDFVCWLLAQKGKKNWLKHNITQ

SEQ ID NO: 1023 - protein, 42 aa, Artificial sequence
  Synthetic polypeptide
  MISC_FEATURE: Analog 104
YAPGTFISDYSIAMDKIHQQDFVCWLLAQKGKKNWLKHNITQ

SEQ ID NO: 1024 - protein, 42 aa, Artificial sequence; identical to SEQ ID NO: 1023
  Synthetic polypeptide
  MISC_FEATURE: Analog 105
  MISC_FEATURE (24)..(24): PEG (40kDa) attached to Cysteine

SEQ ID NO: 1025 - protein, 29 aa, Artificial sequence
  Synthetic polypeptide
  MISC_FEATURE: Analog 106
YAEGTFISDYSIAMDKIHQQDFVNWLLAQ

SEQ ID NO: 1026 - protein, 29 aa, Artificial sequence
  Synthetic polypeptide
  MISC_FEATURE: Analog 107
  MISC_FEATURE (16)..(20): Lactam bridge between residues 16 and 20
HSQGTFISDYSKYLDEIHQKEFIAWLMNT

SEQ ID NO: 1027 - protein, 29 aa, Artificial sequence
  Synthetic polypeptide
  MISC_FEATURE: Analog 108
  MISC_FEATURE (16)..(20): Lactam bridge between residues 16 and 20
HSQGTFISDYSKALDEIHQKEFIAWLMNT

SEQ ID NO: 1028 - protein, 29 aa, Artificial sequence
  Synthetic polypeptide
  MISC_FEATURE: Analog 109
  MISC_FEATURE (16)..(20): Lactam bridge between residues 16 and 20
YSQGTFTSDYSKYLDEIHQKDFVNWLLAQ

SEQ ID NO: 1029 - protein, 29 aa, Artificial sequence
  Synthetic polypeptide
  MISC_FEATURE: Analog 110
  MISC_FEATURE (16)..(20): Lactam bridge between residues 16 and 20
YSQGTFTSDYSIYLDEIHQKDFVNWLLAQ

SEQ ID NO: 1030 - protein, 29 aa, Artificial sequence
  Synthetic polypeptide
  MISC_FEATURE: Analog 111
  MISC_FEATURE (16)..(20): Lactam bridge between residues 16 and 20
HSQGTFTSDYSKYLDEIHQKDFVNWLLAQ

SEQ ID NO: 1031 - protein, 24 aa, Artificial sequence
  Synthetic polypeptide
  MISC_FEATURE: Analog 113
  MOD_RES (1)..(1): Xaa is 3-phenyllactic acid
  MISC_FEATURE (11)..(15): Lactam bridge between residues 11 and 15
XISDYSIAMDEIHQKDFVNWLLAQ

SEQ ID NO: 1032 - protein, 24 aa, Artificial sequence
  Synthetic polypeptide
  MISC_FEATURE: Analog 114
  MOD_RES (1)..(1): Xaa is 3-phenyllactic acid
  MISC_FEATURE (11)..(15): Lactam bridge between residues 11 and 15
XTSDYSKYLDEIHQKDFVNWLLAQ

SEQ ID NO: 1033 - protein, 39 aa, Artificial sequence
  Synthetic polypeptide
  MISC_FEATURE: Analog 115
  MISC_FEATURE (16)..(20): Lactam bridge between residues 16 and 20
HSQGTFTSDYSKYLDEIHQKDFVNWLLAGGPSSGAPPPS

SEQ ID NO: 1034 - protein, 39 aa, Artificial sequence
  Synthetic polypeptide
  MISC_FEATURE: Analog 116
  MISC_FEATURE (16)..(20): Lactam bridge between residues 16 and 20
YSQGTFTSDYSKYLDEIHQKDFVNWLLAGGPSSGAPPPS

SEQ ID NO: 1035 - protein, 29 aa, Artificial sequence
  Synthetic polypeptide
  MISC_FEATURE: Analog 118
  MISC_FEATURE (16)..(20): Lactam bridge between residues 16 and 20
YSQGTFTSDYSKYLDEIHQKEFVNWLLAQ

SEQ ID NO: 1036 - protein, 39 aa, Artificial sequence
  Synthetic polypeptide
  MISC_FEATURE: Analog 120
  MISC_FEATURE (16)..(20): Lactam bridge between residues 16 and 20
YSQGTFTSDYSKYLDEQAAKEFIAWLMNGGPSSGAPPPS

SEQ ID NO: 1037 - protein, 29 aa, Artificial sequence
  Synthetic polypeptide
  MISC_FEATURE: Analog 124
  MISC_FEATURE (16)..(20): Lactam bridge between residues 16 and 20
HSQGTFTSDYSIYMDEIHQKDFVNWLLAQ

SEQ ID NO: 1038 - protein, 29 aa, Artificial sequence
  Synthetic polypeptide
  MISC_FEATURE: Analog 125
  MISC_FEATURE (16)..(20): Lactam bridge between residues 16 and 20
YSQGTFTSDYSIYMDEIHQKDFVNWLLAQ

SEQ ID NO: 1039 - protein, 39 aa, Artificial sequence
  Synthetic polypeptide
  MISC_FEATURE: Analog 127
  MISC_FEATURE (16)..(20): Lactam bridge between residues 16 and 20
YSQGTFTSDYSKYLDEQAAKEFVNWLLAGGPSSGAPPPS

SEQ ID NO: 1040 - protein, 39 aa, Artificial sequence
  Synthetic polypeptide
  MISC_FEATURE: Analog 128
  MISC_FEATURE (16)..(20): Lactam bridge between residues 16 and 20
HSQGTFTSDYSKYLDEIHQKDFIAWLMNGGPSSGAPPPS

SEQ ID NO: 1041 - protein, 39 aa, Artificial sequence
  Synthetic polypeptide
  MISC_FEATURE: Analog 129
  MISC_FEATURE (16)..(20): Lactam bridge between residues 16 and 20
YSQGTFTSDYSKYLDEIHQKDFIAWLMNGGPSSGAPPPS

SEQ ID NO: 1042 - protein, 39 aa, Artificial sequence
  Synthetic polypeptide
  MISC_FEATURE: Analog 139
  MISC_FEATURE (16)..(20): Lactam bridge between residues 16 and 20
YSQGTFTSDYSKYLDEQAAKEFIAWLLAGGPSSGAPPPS

SEQ ID NO: 1043 - protein, 39 aa, Artificial sequence
  Synthetic polypeptide
  MISC_FEATURE: Analog 140
  MISC_FEATURE (16)..(20): Lactam bridge between residues 16 and 20
YSQGTFTSDYSIYLDEQAAKEFVNWLLAGGPSSGAPPPS

SEQ ID NO: 1044 - protein, 39 aa, Artificial sequence
  Synthetic polypeptide
  MISC_FEATURE: Analog 141
  MISC_FEATURE (16)..(20): Lactam bridge between residuess 16 and 20
YSQGTFTSDYSKYMDEQAAKEFVNWLLAGGPSSGAPPPS

SEQ ID NO: 1045 - protein, 39 aa, Artificial sequence
  Synthetic polypeptide
  MISC_FEATURE: Analog 142
  MISC_FEATURE (16)..(20): Lactam bridge between residues 16 and 20
YAEGTFTSDYSIYMDEQAAKEFVNWLLAGGPSSGAPPPS

SEQ ID NO: 1046 - protein, 39 aa, Artificial sequence
  Synthetic polypeptide
  MISC_FEATURE: Analog 143
  MISC_FEATURE (16)..(20): Lactam bridge between residues 16 and 20
YSQGTFTSDYSKYLDERRAKEFVNWLLAGGPSSGAPPPS

SEQ ID NO: 1047 - protein, 39 aa, Artificial sequence
  Synthetic polypeptide
  MISC_FEATURE: Analog 144
  MISC_FEATURE (16)..(20): Lactam bridge between residues 16 and 20
YAQGTFTSDYSIYMDEQAAKEFVNWLLAGGPSSGAPPPS

SEQ ID NO: 1048 - protein, 39 aa, Artificial sequence
  Synthetic polypeptide
  MISC_FEATURE: Analog 145
  MISC_FEATURE (16)..(20): Lactam bridge between residues 16 and 20
YAQGTFISDYSKYLDEQAAKEFVNWLLAGGPSSGAPPPS

SEQ ID NO: 1049 - protein, 39 aa, Artificial sequence; identical to SEQ ID NO: 1048
  Synthetic polypeptide
  MISC_FEATURE: Analog 146
  MISC_FEATURE (16)..(20): Lactam bridge between residues 16 and 20

SEQ ID NO: 1050 - protein, 39 aa, Artificial sequence
  Synthetic polypeptide
  MISC_FEATURE: Analog 147
  MISC_FEATURE (16)..(20): Lactam bridge between residues 16 and 20
YSQGTFTSDYSIYLDEQAAKEFIAWLLAGGPSSGAPPPS

SEQ ID NO: 1051 - protein, 39 aa, Artificial sequence
  Synthetic polypeptide
  MISC_FEATURE: Analog 148
  MISC_FEATURE (16)..(20): Lactam bridge between residues 16 and 20
YSEGTFTSDYSIYLDEQAAKEFIAWLLAGGPSSGAPPPS

SEQ ID NO: 1052 - protein, 39 aa, Artificial sequence
  Synthetic polypeptide
  MISC_FEATURE: Analog 149
  MISC_FEATURE (16)..(20): Lactam bridge between residues 16 and 20
YAEGTFTSDYSIYLDEQAAKEFVNWLLAGGPSSGAPPPS

SEQ ID NO: 1053 - protein, 39 aa, Artificial sequence
  Synthetic polypeptide
  MISC_FEATURE: Analog 150
  MISC_FEATURE (16)..(20): Lactam bridge between residues 16 and 20
YSQGTFISDYSIYLDEQAAKEFVNWLLAGGPSSGAPPPS

SEQ ID NO: 1054 - protein, 39 aa, Artificial sequence; identical to SEQ ID NO: 1042
  Synthetic polypeptide
  MISC_FEATURE: Analog 151
  MISC_FEATURE (16)..(20): Lactam bridge between residues 16 and 20

SEQ ID NO: 1055 - protein, 39 aa, Artificial sequence
  Synthetic polypeptide
  MISC_FEATURE: Analog 152
  MOD_RES (2)..(2): Xaa is Aib
  MISC_FEATURE (16)..(20): Lactam bridge between residues 16 and 20
YXQGTFTSDYSIYLDEQAAKEFVNWLLAGGPSSGAPPPS

SEQ ID NO: 1056 - protein, 39 aa, Artificial sequence
  Synthetic polypeptide
  MISC_FEATURE: Analog 154
  MOD_RES (1)..(1): Xaa is hippuric acid
  MISC_FEATURE (16)..(20): Lactam bridge between residues 16 and 20
XSQGTFTSDYSIYLDEQAAKEFVNWLLAGGPSSGAPPPS

SEQ ID NO: 1057 - protein, 39 aa, Artificial sequence; identical to SEQ ID NO: 1039
  Synthetic polypeptide
  MISC_FEATURE: Analog 155
  MISC_FEATURE (12)..(16): Lactam bridge between residues 12 and 16

SEQ ID NO: 1058 - protein, 39 aa, Artificial sequence
  Synthetic polypeptide
  MISC_FEATURE: Analog 156
  MISC_FEATURE (20)..(24): Lactam bridge between residues 20 and 24
YSQGTFTSDYSIYLDEQAAKEFVEWLLAGGPSSGAPPPS

SEQ ID NO: 1059 - protein, 39 aa, Artificial sequence
  Synthetic polypeptide
  MISC_FEATURE: Analog 157
  MISC_FEATURE (24)..(28): Lactam bridge between residues 24 and 28
YSQGTFTSDYSIYLDEQAAKEFVEWLLKGGPSSGAPPPS

SEQ ID NO: 1060 - protein, 39 aa, Artificial sequence
  Synthetic polypeptide
  MISC_FEATURE: Analog 158
  MOD_RES (2)..(2): Xaa is Aib
  MISC_FEATURE (16)..(20): Lactam bridge between residues 16 and 20
YXQGTFTSDYSIYLDEQAAKEFVCWLLAGGPSSGAPPPS

SEQ ID NO: 1061 - protein, 39 aa, Artificial sequence
  Synthetic polypeptide
  MISC_FEATURE: Analog 162
  MOD_RES (2)..(2): Xaa is Aib
  MISC_FEATURE (16)..(20): Lactam bridge between residues 16 and 20
YXQGTFTSDYSYYLDEQAVKEFVNWLIAGGPSSGAPPPS

SEQ ID NO: 1062 - protein, 29 aa, Artificial sequence
  Synthetic polypeptide
  MISC_FEATURE: Analog 163
  MISC_FEATURE (16)..(20): Lactam bridge between residues 16 and 20
YSQGTFTSDYSIYLDEQAAKEFVNWLLAG

SEQ ID NO: 1063 - protein, 29 aa, Artificial sequence
  Synthetic polypeptide
  MISC_FEATURE: Analog 164
  MOD_RES (2)..(2): Xaa is Aib
  MISC_FEATURE (16)..(20): Lactam bridge between residues 16 and 20
YXQGTFTSDYSIYLDEQAAKEFVNWLLAG

SEQ ID NO: 1064 - protein, 40 aa, Artificial sequence
  Synthetic polypeptide
  MISC_FEATURE: Analog 165
  MOD_RES (2)..(2): Xaa is Aib
  MISC_FEATURE (16)..(20): Lactam bridge between residues 16 and 20
YXQGTFTSDYSIYLDEQAAKEFVNWLLAGGPSSGAPPPSC

SEQ ID NO: 1065 - protein, 40 aa, Artificial sequence; identical to SEQ ID NO: 1064
  Synthetic polypeptide
  MISC_FEATURE: Analog 166
  MOD_RES (2)..(2): Xaa is d-alanine
  MISC_FEATURE (16)..(20): Lactam bridge between residues 16 and 20

SEQ ID NO: 1066 - protein, 39 aa, Artificial sequence
  Synthetic polypeptide
  MISC_FEATURE: Analog 167
  MISC_FEATURE (17)..(20): Lactam bridge between residues 17 and 20
YSQGTFTSDYSIYLDEEAAKEFVNWLLAGGPSSGAPPPS

SEQ ID NO: 1067 - protein, 39 aa, Artificial sequence
  Synthetic polypeptide
  MISC_FEATURE: Analog 168
  MISC_FEATURE (18)..(21): Lactam bridge between residues 18 and 21
YSQGTFTSDYSIYLDEQKAKEFVNWLLAGGPSSGAPPPS

SEQ ID NO: 1068 - protein, 29 aa, Artificial sequence
  Synthetic polypeptide
  MISC_FEATURE: Analog 169
  MOD_RES (2)..(2): Xaa is Aib
  MISC_FEATURE (16)..(20): Lactam bridge between residues 16 and 20
YXQGTFTSDYSIYLDEQAAKEFVCWLLAG

SEQ ID NO: 1069 - protein, 40 aa, Artificial sequence; identical to SEQ ID NO: 1064
  Synthetic polypeptide
  MISC_FEATURE: Analog 170
  MOD_RES (2)..(2): Xaa is Aib
  MISC_FEATURE (16)..(20): Lactam bridge between residues 16 and 20
  MISC_FEATURE (40)..(40): PEG (40kDa) covalently attached to Cysteine

SEQ ID NO: 1070 - protein, 29 aa, Artificial sequence
  Synthetic polypeptide
  MISC_FEATURE: Analog 172
  MOD_RES (2)..(2): Xaa is Aib
  MISC_FEATURE (16)..(20): Lactam bridge between residues 16 and 20
  MISC_FEATURE (24)..(24): PEG (40kDa) covalently attached to Cysteine
YXQGTFTSDYSIYLDEQAAKEFVCWLLAG

SEQ ID NO: 1071 - protein, 40 aa, Artificial sequence
  Synthetic polypeptide
  MISC_FEATURE: Analog 174
  MOD_RES (2)..(2): Xaa is Aib
  MISC_FEATURE (16)..(20): Lactam bridge between residues 16 and 20
YXEGTFTSDYSIYLDEQAAKEFVNWLLAGGPSSGAPPPSC

SEQ ID NO: 1072 - protein, 39 aa, Artificial sequence; identical to SEQ ID NO: 1060
  Synthetic polypeptide
  MISC_FEATURE: Analog 175
  MOD_RES (2)..(2): Xaa is Aib
  MISC_FEATURE (16)..(20): Lactam bridge between residues 16 and 20
  MISC_FEATURE (24)..(24): PEG (40kDa) covalently attached to Cysteine

SEQ ID NO: 1073 - protein, 40 aa, Artificial sequence
  Synthetic polypeptide
  MISC_FEATURE: Analog 176
  MOD_RES (2)..(2): Xaa is Aib
  MISC_FEATURE (16)..(20): Lactam bridge between residues 16 and 20
YXQGTFISDYSIYLDEQAAKEFVNWLLAGGPSSGAPPPSC

SEQ ID NO: 1074 - protein, 29 aa, Artificial sequence
  Synthetic polypeptide
  MISC_FEATURE: Analog 177
  MOD_RES (2)..(2): Xaa is Aib
  MISC_FEATURE (16)..(20): Lactam bridge between residues 16 and 20
YXQGTFISDYSIYLDEQAAKEFVCWLLAG

SEQ ID NO: 1075 - protein, 40 aa, Artificial sequence; identical to SEQ ID NO: 1071
  Synthetic polypeptide
  MISC_FEATURE: Analog 178
  MOD_RES (2)..(2): Xaa is Aib
  MISC_FEATURE (16)..(20): Lactam bridge between residues 16 and 20
  MISC_FEATURE (40)..(40): PEG (40kDa) covalently attached to Cysteine

SEQ ID NO: 1076 - protein, 29 aa, Artificial sequence
  Synthetic polypeptide
  MISC_FEATURE: Analog 179
  MOD_RES (2)..(2): Xaa is Aib
  MISC_FEATURE (16)..(20): Lactam bridge between residues 16 and 20
  MISC_FEATURE (24)..(24): PEG (40kDa) covalently attached to Cysteine
YXQGTFISDYSIYLDEQAAKEFVCWLLAG

SEQ ID NO: 1077 - protein, 40 aa, Artificial sequence; identical to SEQ ID NO: 1073
  Synthetic polypeptide
  MISC_FEATURE: Analog 182
  MOD_RES (2)..(2): Xaa is Aib
  MISC_FEATURE (16)..(20): Lactam bridge between residues 16 and 20
  MISC_FEATURE (40)..(40): PEG (40kDa) covalently attached to Cysteine

SEQ ID NO: 1078 - protein, 29 aa, Artificial sequence
  Synthetic polypeptide
  MISC_FEATURE: Analog 186
  MOD_RES (2)..(2): Xaa is Aib
  MISC_FEATURE (16)..(20): Lactam bridge between residues 16 and 20
  MISC_FEATURE (24)..(24): PEG (40kDa) covalently attached to Cysteine
YXQGTFTSDYSIYLDEQAAKEFVCWLMNG

SEQ ID NO: 1079 - protein, 39 aa, Artificial sequence; identical to SEQ ID NO: 1055
  Synthetic polypeptide
  MISC_FEATURE: Analog 191
  MOD_RES (2)..(2): Xaa is Aib

SEQ ID NO: 1080 - protein, 34 aa, Artificial sequence
  Synthetic polypeptide
  MISC_FEATURE: Analog 192
FTSDYSIYLDEQAAKEFVNWLLAGGPSSGAPPPS

SEQ ID NO: 1081 - protein, 38 aa, Artificial sequence
  Synthetic polypeptide
  MISC_FEATURE: Analog 194
  MOD_RES (1)..(1): Xaa is Aib
XQGTFTSDYSIYLDEEAVRLFVNWLLAGGPSSGAPPPS

SEQ ID NO: 1082 - protein, 26 aa, Artificial sequence
  Synthetic polypeptide
  MISC_FEATURE: Analog 197
  MISC_FEATURE (13)..(17): Lactam bridge between residues 13 and 17
GTFTSDYSIYLDEQAAKEFVNWLLAG

SEQ ID NO: 1083 - protein, 28 aa, Artificial sequence
  Synthetic polypeptide
  MISC_FEATURE: Analog 198
  MOD_RES (1)..(1): Xaa is Aib
  MISC_FEATURE (15)..(19): Lactam bridge between residues 15 and 19
XQGTFTSDYSIYLDEQAAKEFVNWLLAG

SEQ ID NO: 1084 - protein, 40 aa, Artificial sequence
  Synthetic polypeptide
  MISC_FEATURE: Analog 199
  MOD_RES (2)..(2): Xaa is Aib
  MISC_FEATURE (16)..(20): Lactam bridge between residues 16 and 20
YXQGTFVSDYSIYLDEQAAKEFVNWLLAGGPSSGAPPPSC

SEQ ID NO: 1085 - protein, 40 aa, Artificial sequence
  Synthetic polypeptide
  MISC_FEATURE: Analog 200
  MOD_RES (2)..(2): Xaa is Aib
  MISC_FEATURE (16)..(20): Lactam bridge between residues 16 and 20
  MOD_RES (27)..(27): Xaa is Nle
YXQGTFTSDYSIYLDEQAAKEFVNWLXAGGPSSGAPPPSC

SEQ ID NO: 1086 - protein, 39 aa, Artificial sequence
  Synthetic polypeptide
  MISC_FEATURE: Analog 201
  MOD_RES (2)..(2): Xaa is Aib
YXQGTFTSDYSIYLDEEAVRLFVNWLLAGGPSSGAPPPS

SEQ ID NO: 1087 - protein, 40 aa, Artificial sequence; identical to SEQ ID NO: 1084
  Synthetic polypeptide
  MISC_FEATURE: Analog 202
  MOD_RES (2)..(2): Xaa is Aib
  MISC_FEATURE (16)..(20): Lactam bridge between residues 16 and 20
  MISC_FEATURE (40)..(40): PEG (40kDa) covalently attached to Cysteine

SEQ ID NO: 1088 - protein, 40 aa, Artificial sequence; identical to SEQ ID NO: 1085
  Synthetic polypeptide
  MISC_FEATURE: Analog 203
  MOD_RES (2)..(2): Xaa is Aib
  MISC_FEATURE (16)..(20): Lactam bridge between residues 16 and 20
  MOD_RES (27)..(27): Xaa is Nle
  MISC_FEATURE (40)..(40): PEG (40kDa) covalently attached to Cysteine

SEQ ID NO: 1089 - protein, 40 aa, Artificial sequence
  Synthetic polypeptide
  MISC_FEATURE: Analog 204
  MOD_RES (2)..(2): Xaa is Aib
  MISC_FEATURE (16)..(20): Lactam bridge between residues 16 and 20
YXEGTFTSDYSIYLDEQAAKEFVNWLLAGRPSSGAPPPSC

SEQ ID NO: 1090 - protein, 40 aa, Artificial sequence; identical to SEQ ID NO: 1089
  Synthetic polypeptide
  MISC_FEATURE: Analog 205
  MOD_RES (2)..(2): Xaa is Aib
  MISC_FEATURE (16)..(20): Lactam bridge between residues 16 and 20
  MISC_FEATURE (40)..(40): PEG (40kDa) covalently attached to Cysteine

SEQ ID NO: 1091 - protein, 43 aa, Artificial sequence
  Synthetic polypeptide
  MISC_FEATURE: Analog 206
  MOD_RES (2)..(2): Xaa is Aib
  MISC_FEATURE (16)..(20): Lactam bridge between residues 16 and 20
YXEGTFTSDYSIYLDEQAAKEFVNWLLAGKGKKNWLKHNITQC

SEQ ID NO: 1092 - protein, 43 aa, Artificial sequence
  Synthetic polypeptide
  MISC_FEATURE: Analog 207
  MOD_RES (2)..(2): Xaa is Aib
  MISC_FEATURE (16)..(20): Lactam bridge between residues 16 and 20
YXQGTFTSDYSIYLDEQAAKEFVNWLLAGKGKKNWLKHNITQC

SEQ ID NO: 1093 - protein, 43 aa, Artificial sequence; identical to SEQ ID NO: 1091
  Synthetic polypeptide
  MISC_FEATURE: Analog 208
  MOD_RES (2)..(2): Xaa is Aib
  MISC_FEATURE (16)..(20): Lactam bridge between residues 16 and 20
  MISC_FEATURE (43)..(43): PEG (40kDa) covalently attached to Cysteine

SEQ ID NO: 1094 - protein, 40 aa, Artificial sequence
  Synthetic polypeptide
  MISC_FEATURE: Analog 209
  MOD_RES (2)..(2): Xaa is Aib
  MISC_FEATURE (9)..(12): Lactam bridge between residues 9 and 12
  MISC_FEATURE (16)..(20): Lactam bridge between residues 16 and 20
YXQGTFTSEYSKYLDEQAAKEFVNWLLAGGPSSGAPPPSC

SEQ ID NO: 1095 - protein, 10 aa, Artificial sequence
  Synthetic polypeptide
  MISC_FEATURE: CEX
GPSSGAPPPS

SEQ ID NO: 1096 - protein, 11 aa, Artificial sequence
  Synthetic polypeptide
  MISC_FEATURE (1)..(1): Xaa is any amino acid
XGPSSGAPPPS

SEQ ID NO: 1097 - protein, 8 aa, Artificial sequence
  Synthetic polypeptide
KRNRNNIA

SEQ ID NO: 1098 - protein, 4 aa, Artificial sequence
  Synthetic polypeptide
KRNR

SEQ ID NO: 1099 - protein, 40 aa, Artificial Sequence
  Synthetic polypeptide
  MOD_RES (2)..(2): Xaa is Aib
  MOD_RES (20)..(20): Xaa is Aib
  MISC_FEATURE (40)..(40): PEG (40kDa) covalently attached to Cysteine
  MISC_FEATURE (40)..(40): C-terminal amidation
YXEGTFTSDYSIYLDKQAAXEFVNWLLAGGPSSGAPPPSC

SEQ ID NO: 1100 - protein, 40 aa, Artificial Sequence
  Synthetic polypeptide
  MOD_RES (2)..(2): Xaa is Aib
  MOD_RES (20)..(20): Xaa is Aib
  MISC_FEATURE (24)..(24): PEG (40kDa) covalently attached to Cysteine
  MISC_FEATURE (40)..(40): C-terminal amidation
YXEGTFTSDYSIYLDKQAAXEFVCWLLAGGPSSGAPPPSK

SEQ ID NO: 1101 - protein, 40 aa, Artificial Sequence; identical to SEQ ID NO: 1100
  Synthetic polypeptide
  MOD_RES (2)..(2): Xaa is Aib
  MOD_RES (20)..(20): Xaa is Aib
  MISC_FEATURE (24)..(24): PEG (40kDa) covalently attached to Cysteine
  MISC_FEATURE (40)..(40): 16 Carbon fatty acyl group covalently attached to Lysine
  MISC_FEATURE (40)..(40): C-terminal amidation

SEQ ID NO: 1102 - protein, 40 aa, Artificial Sequence; identical to SEQ ID NO: 1100
  Synthetic polypeptide
  MOD_RES (2)..(2): Xaa is Aib
  MOD_RES (20)..(20): Xaa is Aib
  MISC_FEATURE (24)..(24): PEG (40kDa) covalently attached to Cysteine
  MISC_FEATURE (40)..(40): 14 Carbon fatty acyl group covalently attached Lysine
  MISC_FEATURE (40)..(40): C-terminal amidation

SEQ ID NO: 1103 - protein, 40 aa, Artificial Sequence; identical to SEQ ID NO: 1100
  Synthetic polypeptide
  MOD_RES (2)..(2): Xaa is Aib
  MOD_RES (20)..(20): Xaa is Aib
  MISC_FEATURE (24)..(24): PEG (40kDa) covalently attached to Cysteine
  MISC_FEATURE (40)..(40): 18 Carbon fatty acyl group covalently attached to Lysine
  MISC_FEATURE (40)..(40): C-terminal amidation

SEQ ID NO: 1104 - protein, 40 aa, Artificial Sequence
  Synthetic polypeptide
  MOD_RES (2)..(2): Xaa is Aib
  MOD_RES (20)..(20): Xaa is Aib
  MISC_FEATURE (40)..(40): 14 Carbon fatty acyl group covalently attached to Lysine
  MISC_FEATURE (40)..(40): C-terminal amidation
YXEGTFTSDYSIYLDKQAAXEFVNWLLAGGPSSGAPPPSK

SEQ ID NO: 1105 - protein, 40 aa, Artificial Sequence; identical to SEQ ID NO: 1104
  Synthetic polypeptide
  MOD_RES (2)..(2): Xaa is Aib
  MOD_RES (20)..(20): Xaa is Aib
  MISC_FEATURE (40)..(40): 16 Carbon fatty acyl group covalently attached Lysine
  MISC_FEATURE (40)..(40): C-terminal amidation

SEQ ID NO: 1106 - protein, 40 aa, Artificial Sequence; identical to SEQ ID NO: 1104
  Synthetic polypeptide
  MOD_RES (2)..(2): Xaa is Aib
  MOD_RES (20)..(20): Xaa is Aib
  MISC_FEATURE (40)..(40): 18 Carbon fatty acyl group covalently attached to Lysine
  MISC_FEATURE (40)..(40): C-terminal amidation

SEQ ID NO: 1107 - protein, 40 aa, Artificial Sequence
  Synthetic polypeptide
  MOD_RES (2)..(2): Xaa is Aib
  MOD_RES (20)..(20): Xaa is Aib
  MISC_FEATURE (40)..(40): C-terminal amidation
YXQGTFTSDYSIYLDKQAAXEFVNWLLAGGPSSGAPPPSC

SEQ ID NO: 1108 - protein, 40 aa, Artificial Sequence; identical to SEQ ID NO: 1107
  Synthetic polypeptide
  MOD_RES (2)..(2): Xaa is Aib
  MOD_RES (20)..(20): Xaa is Aib
  MISC_FEATURE (40)..(40): PEG (40kDa) attached to Cysteine
  MISC_FEATURE (40)..(40): C-terminal amidation

SEQ ID NO: 1109 - protein, 40 aa, Artificial Sequence; identical to SEQ ID NO: 1099
  Synthetic polypeptide
  MOD_RES (2)..(2): Xaa is Aib
  MOD_RES (20)..(20): Xaa is Aib
  MISC_FEATURE (40)..(40): C-terminal amidation

SEQ ID NO: 1110 - protein, 29 aa, Artificial Sequence
  Synthetic polypeptide
  MOD_RES (2)..(2): Xaa is Aib
  MOD_RES (20)..(20): Xaa is Aib
  MISC_FEATURE (29)..(29): C-terminal amidation
YXQGTFTSDYSIYLDKQAAXEFVCWLLAG

SEQ ID NO: 1111 - protein, 40 aa, Artificial Sequence; identical to SEQ ID NO: 1104
  Synthetic polypeptide
  MOD_RES (2)..(2): Xaa is Aib
  MOD_RES (20)..(20): Xaa is Aib
  MISC_FEATURE (40)..(40): C-terminal amidation

SEQ ID NO: 1112 - protein, 29 aa, Artificial Sequence
  Synthetic polypeptide
  MISC_FEATURE (2)..(2): Xaa is Aib
  MISC_FEATURE (20)..(20): Xaa is Aib
YXQGTFTSDYSIYLDKQAAXEFVNWLLAG

SEQ ID NO: 1113 - protein, 39 aa, Artificial Sequence
  Synthetic polypeptide
  MOD_RES (2)..(2): Xaa is Aib
  MOD_RES (20)..(20): Xaa is Aib
  MISC_FEATURE (24)..(24): 14 Carbon fatty acyl group covalently attached to Lysine
  MISC_FEATURE (39)..(39): C-terminal amidation
YXEGTFTSDYSIYLDKQAAXEFVKWLLAGGPSSGAPPPS

SEQ ID NO: 1114 - protein, 39 aa, Artificial Sequence; identical to SEQ ID NO: 1113
  Synthetic polypeptide
  MOD_RES (2)..(2): Xaa is Aib
  MOD_RES (20)..(20): Xaa is Aib
  MISC_FEATURE (24)..(24): 16 Carbon fatty acyl group covalently attached to Lysine
  MISC_FEATURE (39)..(39): C-terminal amidation

SEQ ID NO: 1115 - protein, 39 aa, Artificial Sequence; identical to SEQ ID NO: 1113
  Synthetic polypeptide
  MOD_RES (2)..(2): Xaa is Aib
  MOD_RES (20)..(20): Xaa is Aib
  MISC_FEATURE (24)..(24): 18 Carbon fatty acyl group covalently attached to Lysine
  MISC_FEATURE (39)..(39): C-terminal amidation

SEQ ID NO: 1116 - protein, 39 aa, Artificial Sequence; identical to SEQ ID NO: 1113
  Synthetic polypeptide
  MOD_RES (2)..(2): Xaa is Aib
  MOD_RES (20)..(20): Xaa is Aib
  MISC_FEATURE (39)..(39): C-terminal amidation

SEQ ID NO: 1117 - protein, 39 aa, Artificial Sequence
  Synthetic polypeptide
  MOD_RES (2)..(2): Xaa is Aib
  MISC_FEATURE (10)..(10): 14 Carbon fatty acyl group covalently attached to Lysine
  MOD_RES (20)..(20): Xaa is Aib
  MISC_FEATURE (39)..(39): C-terminal amidation
YXEGTFTSDKSIYLDKQAAXEFVNWLLAGGPSSGAPPPS

SEQ ID NO: 1118 - protein, 39 aa, Artificial Sequence; identical to SEQ ID NO: 1117
  Synthetic polypeptide
  MOD_RES (2)..(2): Xaa is Aib
  MISC_FEATURE (10)..(10): 16 Carbon fatty acyl group covalently attached to Lysine
  MOD_RES (20)..(20): Xaa is Aib
  MISC_FEATURE (39)..(39): C-terminal amidation

SEQ ID NO: 1119 - protein, 39 aa, Artificial Sequence; identical to SEQ ID NO: 1117
  Synthetic polypeptide
  MOD_RES (2)..(2): Xaa is Aib
  MISC_FEATURE (10)..(10): 18 Carbon fatty acyl group covalently attached to Lysine
  MOD_RES (20)..(20): Xaa is Aib
  MISC_FEATURE (39)..(39): C-terminal amidation

SEQ ID NO: 1120 - protein, 39 aa, Artificial Sequence; identical to SEQ ID NO: 1117
  Synthetic polypeptide
  MOD_RES (2)..(2): Xaa is Aib
  MOD_RES (20)..(20): Xaa is Aib
  MISC_FEATURE (39)..(39): C-terminal amidation

SEQ ID NO: 1121 - protein, 40 aa, Artificial Sequence
  Synthetic polypeptide
  MOD_RES (2)..(2): Xaa is Aib
  MOD_RES (16)..(16): Xaa is Orn
  MOD_RES (20)..(20): Xaa is Aib
  MISC_FEATURE (40)..(40): C-terminal amidation
YXQGTFTSDYSIYLDXQAAXEFVNWLLAGGPSSGAPPPSC

SEQ ID NO: 1122 - protein, 40 aa, Artificial Sequence; identical to SEQ ID NO: 1121
  Synthetic polypeptide
  MOD_RES (2)..(2): Xaa is Aib
  MOD_RES (16)..(16): Xaa is 2,4-diaminobutyric acid
  MOD_RES (20)..(20): Xaa is Aib
  MISC_FEATURE (40)..(40): C-terminal amidation

SEQ ID NO: 1123 - protein, 40 aa, Artificial Sequence
  Synthetic polypeptide
  MOD_RES (2)..(2): Xaa is Aib
  MOD_RES (20)..(20): Xaa is Aib
  MISC_FEATURE (40)..(40): 14 Carbon fatty acyl group covalentaly attached to Lysine
  MISC_FEATURE (40)..(40): C-terminal amidation
YXQGTFTSDYSIYLDKQAAXEFVNWLLAGGPSSGAPPPSK

SEQ ID NO: 1124 - protein, 40 aa, Artificial Sequence; identical to SEQ ID NO: 1123
  Synthetic polypeptide
  MOD_RES (2)..(2): Xaa is Aib
  MOD_RES (20)..(20): Xaa is Aib
  MISC_FEATURE (40)..(40): 16 Carbon fatty acyl group covalently attached to Lysine
  MISC_FEATURE (40)..(40): C-terminal amidation

SEQ ID NO: 1125 - protein, 40 aa, Artificial Sequence; identical to SEQ ID NO: 1123
  Synthetic polypeptide
  MOD_RES (2)..(2): Xaa is Aib
  MOD_RES (20)..(20): Xaa is Aib
  MISC_FEATURE (40)..(40): 18 Carbon fatty acyl group covalently attached to Lysine
  MISC_FEATURE (40)..(40): C-terminal amidation

SEQ ID NO: 1126 - protein, 40 aa, Artificial Sequence; identical to SEQ ID NO: 1123
  Synthetic polypeptide
  MOD_RES (2)..(2): Xaa is Aib
  MOD_RES (20)..(20): Xaa is Aib
  MISC_FEATURE (40)..(40): C-terminal amidation

SEQ ID NO: 1127 - protein, 29 aa, Artificial Sequence
  Synthetic polypeptide
  MOD_RES (2)..(2): Xaa is Aib
  MOD_RES (20)..(20): Xaa is Aib
  MISC_FEATURE (24)..(24): PEG (40kDa) covalently attached to Cysteine
  MISC_FEATURE (29)..(29): C-terminal amidation
YXQGTFTSDYSIYLDKQAAXEFVCWLLAG

SEQ ID NO: 1128 - protein, 29 aa, Artificial Sequence
  Synthetic polypeptide
  MOD_RES (2)..(2): Xaa is Aib
  MISC_FEATURE (10)..(10): 14 Carbon fatty acyl group covalently attached to Lysine
  MOD_RES (20)..(20): Xaa is Aib
  MISC_FEATURE (29)..(29): C-terminal amidation
YXEGTFTSDKSIYLDKQAAXEFVNWLLAG

SEQ ID NO: 1129 - protein, 29 aa, Artificial Sequence
  Synthetic polypeptide
  MOD_RES (2)..(2): Xaa is Aib
  MISC_FEATURE (10)..(10): 16 Carbon fatty acyl group covalently attached to Lysine
  MOD_RES (20)..(20): Xaa is Aib
  MISC_FEATURE (29)..(29): C-terminal amidation
YXEGTFTSDKSIYLDKQAAXEFVNWLLAG

SEQ ID NO: 1130 - protein, 29 aa, Artificial Sequence
  Synthetic polypeptide
  MOD_RES (2)..(2): Xaa is Aib
  MISC_FEATURE (10)..(10): 18 Carbon fatty acyl group covalently attached to Lysine
  MOD_RES (20)..(20): Xaa is Aib
  MISC_FEATURE (29)..(29): C-terminal amidation
YXEGTFTSDKSIYLDKQAAXEFVNWLLAG

SEQ ID NO: 1131 - protein, 29 aa, Artificial Sequence
  Synthetic polypeptide
  MOD_RES (2)..(2): Xaa is Aib
  MOD_RES (20)..(20): Xaa is Aib
  MISC_FEATURE (29)..(29): C-terminal amidation
YXEGTFTSDKSIYLDKQAAXEFVNWLLAG

SEQ ID NO: 1132 - protein, 40 aa, Artificial Sequence
  Synthetic polypeptide
  MOD_RES (2)..(2): Xaa is Aib
  MOD_RES (20)..(20): Xaa is Aib
  MISC_FEATURE (40)..(40): 14 Carbon fatty acyl group covalently attached to Lysine
  MISC_FEATURE (40)..(40): C-terminal amidation
YXQGTFTSDYSIYLDKQAAXEFVCWLLAGGPSSGAPPPSK

SEQ ID NO: 1133 - protein, 40 aa, Artificial Sequence; identical to SEQ ID NO: 1132
  Synthetic polypeptide
  MOD_RES (2)..(2): Xaa is Aib
  MOD_RES (20)..(20): Xaa is Aib
  MISC_FEATURE (40)..(40): 16 Carbon fatty acyl group covalently attached to Lysine
  MISC_FEATURE (40)..(40): C-terminal amidation

SEQ ID NO: 1134 - protein, 40 aa, Artificial Sequence; identical to SEQ ID NO: 1132
  Synthetic polypeptide
  MOD_RES (2)..(2): Xaa is Aib
  MOD_RES (20)..(20): Xaa is Aib
  MISC_FEATURE (40)..(40): 18 Carbon fatty acyl group covalently attached to Lysine
  MISC_FEATURE (40)..(40): C-terminal amidation

SEQ ID NO: 1135 - protein, 40 aa, Artificial Sequence; identical to SEQ ID NO: 1132
  Synthetic polypeptide
  MOD_RES (2)..(2): Xaa is Aib
  MOD_RES (20)..(20): Xaa is Aib
  MISC_FEATURE (40)..(40): C-terminal amidation

SEQ ID NO: 1136 - protein, 40 aa, Artificial Sequence; identical to SEQ ID NO: 1132
  Synthetic polypeptide
  MOD_RES (2)..(2): Xaa is Aib
  MOD_RES (20)..(20): Xaa is Aib
  MISC_FEATURE (24)..(24): PEG (40kDa) covalently attached to Cysteine
  MISC_FEATURE (40)..(40): 14 Carbon fatty acyl group covalently attached to Lysine
  MISC_FEATURE (40)..(40): C-terminal amidation

SEQ ID NO: 1137 - protein, 40 aa, Artificial Sequence; identical to SEQ ID NO: 1132
  Synthetic polypeptide
  MOD_RES (2)..(2): Xaa is Aib
  MOD_RES (20)..(20): Xaa is Aib
  MISC_FEATURE (24)..(24): PEG (40kDa) covalently attached to Cysteine
  MISC_FEATURE (40)..(40): 16 Carbon fatty acyl group covalently attached to Lysine
  MISC_FEATURE (40)..(40): C-terminal amidation

SEQ ID NO: 1138 - protein, 40 aa, Artificial Sequence; identical to SEQ ID NO: 1132
  Synthetic polypeptide
  MOD_RES (2)..(2): Xaa is Aib
  MOD_RES (20)..(20): Xaa is Aib
  MISC_FEATURE (24)..(24): PEG (40kDa) covalently attached to Cysteine
  MISC_FEATURE (40)..(40): 18 Carbon fatty acyl group covalently attached to Lysine
  MISC_FEATURE (40)..(40): C-terminal amidation

SEQ ID NO: 1139 - protein, 40 aa, Artificial Sequence; identical to SEQ ID NO: 1132
  Synthetic polypeptide
  MOD_RES (2)..(2): Xaa is Aib
  MOD_RES (20)..(20): Xaa is Aib
  MISC_FEATURE (24)..(24): PEG (40kDa) covalently attached to Cysteine
  MISC_FEATURE (40)..(40): C-terminal amidation

SEQ ID NO: 1140 - protein, 40 aa, Artificial Sequence; identical to SEQ ID NO: 1099
  Synthetic polypeptide
  MOD_RES (2)..(2): Xaa is Aib
  MOD_RES (20)..(20): Xaa is Aib
  MISC_FEATURE (40)..(40): PEG (40kDa) covalently attached to Cysteine
  MISC_FEATURE (40)..(40): C-terminal amidation

SEQ ID NO: 1141 - protein, 40 aa, Artificial Sequence; identical to SEQ ID NO: 1100
  Synthetic polypeptide
  MOD_RES (2)..(2): Xaa is Aib
  MOD_RES (20)..(20): Xaa is Aib
  MISC_FEATURE (40)..(40): 16 Carbon fatty acyl group covalently attached to Lysine
  MISC_FEATURE (40)..(40): C-terminal amidation

SEQ ID NO: 1142 - protein, 40 aa, Artificial Sequence
  Synthetic polypeptide
  MOD_RES (2)..(2): Xaa is Aib
  MOD_RES (20)..(20): Xaa is Aib
  MISC_FEATURE (40)..(40): 16 Carbon fatty acyl group covalently attached to Lysine
  MISC_FEATURE (40)..(40): C-terminal amidation
YXQGTFTSDYSIYLDKQAAXEFVCWLMNGGPSSGAPPPSK

SEQ ID NO: 1143 - protein, 40 aa, Artificial Sequence; identical to SEQ ID NO: 1142
  Synthetic polypeptide
  MOD_RES (2)..(2): Xaa is Aib
  MOD_RES (20)..(20): Xaa is Aib
  MISC_FEATURE (24)..(24): PEG (40kDa) covalently attached to Cysteine
  MISC_FEATURE (40)..(40): 16 Carbon fatty acyl group covalently attached to Lysine
  MISC_FEATURE (40)..(40): C-terminal amidation

SEQ ID NO: 1144 - protein, 40 aa, Artificial Sequence; identical to SEQ ID NO: 1100
  Synthetic polypeptide
  MOD_RES (2)..(2): Xaa is Aib
  MOD_RES (20)..(20): Xaa is Aib
  MISC_FEATURE (40)..(40): 14 Carbon fatty acyl group covalently attached to Lysine
  MISC_FEATURE (40)..(40): C-terminal amidation

SEQ ID NO: 1145 - protein, 40 aa, Artificial Sequence; identical to SEQ ID NO: 1100
  Synthetic polypeptide
  MOD_RES (2)..(2): Xaa is Aib
  MOD_RES (20)..(20): Xaa is Aib
  MISC_FEATURE (40)..(40): 18 Carbon fatty acyl group covalently attached to Lysine
  MISC_FEATURE (40)..(40): C-terminal amidation

SEQ ID NO: 1146 - protein, 40 aa, Artificial Sequence; identical to SEQ ID NO: 1100
  Synthetic polypeptide
  MOD_RES (2)..(2): Xaa is Aib
  MOD_RES (20)..(20): Xaa is Aib
  MISC_FEATURE (40)..(40): C-terminal amidation

SEQ ID NO: 1147 - protein, 40 aa, Artificial Sequence; identical to SEQ ID NO: 1104
  Synthetic polypeptide
  MOD_RES (2)..(2): Xaa is Aib
  MOD_RES (20)..(20): Xaa is Aib
  MISC_FEATURE (40)..(40): 3-SH-propionic acyl group covalently attached to Lysine
  MISC_FEATURE (40)..(40): C-terminal amidation

SEQ ID NO: 1148 - protein, 40 aa, Artificial Sequence; identical to SEQ ID NO: 1123
  Synthetic polypeptide
  MOD_RES (2)..(2): Xaa is Aib
  MOD_RES (20)..(20): Xaa is Aib
  MISC_FEATURE (40)..(40): 8 Carbon fatty acyl group covalently attached to Lysine
  MISC_FEATURE (40)..(40): C-terminal amidation

SEQ ID NO: 1149 - protein, 40 aa, Artificial Sequence
  Synthetic polypeptide
  MOD_RES (2)..(2): Xaa is Aib
  MOD_RES (20)..(20): Xaa is Aib
  MISC_FEATURE (40)..(40): C-terminal amidation
YXQGTFSSDYSIYLDKQAAXEFVNWLLAGGPSSGAPPPSC

SEQ ID NO: 1150 - protein, 40 aa, Artificial Sequence
  Synthetic polypeptide
  MOD_RES (2)..(2): Xaa is Aib
  MOD_RES (7)..(7): Xaa is 2-aminobutyric acid
  MOD_RES (20)..(20): Xaa is Aib
  MISC_FEATURE (40)..(40): C-terminal amidation
YXQGTFXSDYSIYLDKQAAXEFVNWLLAGGPSSGAPPPSC

SEQ ID NO: 1151 - protein, 40 aa, Artificial Sequence; identical to SEQ ID NO: 1132
  Synthetic polypeptide
  MOD_RES (2)..(2): Xaa is Aib
  MOD_RES (20)..(20): Xaa is Aib
  MISC_FEATURE (40)..(40): 8 Carbon fatty acyl group covalently attached to Lysine
  MISC_FEATURE (40)..(40): C-terminal amidation

SEQ ID NO: 1152 - protein, 40 aa, Artificial Sequence; identical to SEQ ID NO: 1100
  Synthetic polypeptide
  MOD_RES (2)..(2): Xaa is Aib
  MOD_RES (20)..(20): Xaa is Aib
  MISC_FEATURE (40)..(40): 8 Carbon fatty acyl group covalently attached to Lysine
  MISC_FEATURE (40)..(40): C-terminal amidation

SEQ ID NO: 1153 - protein, 40 aa, Artificial Sequence; identical to SEQ ID NO: 1100
  Synthetic polypeptide
  MOD_RES (2)..(2): Xaa is Aib
  MOD_RES (20)..(20): Xaa is Aib
  MISC_FEATURE (24)..(24): PEG (40kDa) covalently attached to Cysteine
  MISC_FEATURE (40)..(40): C-terminal amidation

SEQ ID NO: 1154 - protein, 40 aa, Artificial Sequence
  Synthetic polypeptide
  MOD_RES (2)..(2): Xaa is Aib
  MOD_RES (20)..(20): Xaa is Aib
  MOD_RES (40)..(40): Xaa is d-Lysine
  MISC_FEATURE (40)..(40): 14 Carbon fatty acyl group covalently attached to d-Lysine
  MISC_FEATURE (40)..(40): C-terminal amidation
YXEGTFTSDYSIYLDKQAAXEFVCWLLAGGPSSGAPPPSX

SEQ ID NO: 1155 - protein, 40 aa, Artificial Sequence; identical to SEQ ID NO: 1154
  Synthetic polypeptide
  MOD_RES (2)..(2): Xaa is Aib
  MOD_RES (20)..(20): Xaa is Aib
  MOD_RES (40)..(40): Xaa is d-Lysine
  MISC_FEATURE (40)..(40): C-terminal amidation

SEQ ID NO: 1156 - protein, 40 aa, Artificial Sequence; identical to SEQ ID NO: 1154
  Synthetic polypeptide
  MOD_RES (2)..(2): Xaa is Aib
  MOD_RES (20)..(20): Xaa is Aib
  MISC_FEATURE (24)..(24): PEG (40kDa) covalently attached to Cysteine
  MOD_RES (40)..(40): Xaa is d-Lysine
  MISC_FEATURE (40)..(40): 14 Carbon fatty acyl group covalently attached to Lysine
  MISC_FEATURE (40)..(40): C-terminal amidation

SEQ ID NO: 1157 - protein, 40 aa, Artificial Sequence; identical to SEQ ID NO: 1154
  Synthetic polypeptide
  MOD_RES (2)..(2): Xaa is Aib
  MOD_RES (20)..(20): Xaa is Aib
  MISC_FEATURE (24)..(24): PEG (40kDa) covalently attached to Cysteine
  MISC_FEATURE (40)..(40): Xaa is d-Lysine
  MISC_FEATURE (40)..(40): C-terminal amidation

SEQ ID NO: 1158 - protein, 39 aa, Artificial Sequence
  Synthetic polypeptide
  MOD_RES (2)..(2): Xaa is Aib
  MISC_FEATURE (10)..(10): 14 Carbon fatty acyl group covalently attached to Lysine
  MOD_RES (20)..(20): Xaa is Aib
  MISC_FEATURE (40)..(40): C-terminal amidation
YXEGTFTSDKSIYLDKQAAXEFVCWLLAGGPSSGAPPPS

SEQ ID NO: 1159 - protein, 39 aa, Artificial Sequence; identical to SEQ ID NO: 1158
  Synthetic polypeptide
  MOD_RES (2)..(2): Xaa is Aib
  MOD_RES (20)..(20): Xaa is Aib
  MISC_FEATURE (40)..(40): C-terminal amidation

SEQ ID NO: 1160 - protein, 41 aa, Artificial Sequence
  Synthetic polypeptide
  MOD_RES (2)..(2): Xaa is Aib
  MOD_RES (20)..(20): Xaa is Aib
  MISC_FEATURE (40)..(40): 14 Carbon fatty acyl group covalently attached to Lysine
  MISC_FEATURE (41)..(41): C-terminal amidation
YXEGTFTSDYSIYLDKQAAXEFVNWLLAGGPSSGAPPPSKC

SEQ ID NO: 1161 - protein, 41 aa, Artificial Sequence; identical to SEQ ID NO: 1160
  Synthetic polypeptide
  MOD_RES (2)..(2): Xaa is Aib
  MOD_RES (20)..(20): Xaa is Aib
  MISC_FEATURE (41)..(41): C-terminal amidation

SEQ ID NO: 1162 - protein, 39 aa, Artificial Sequence; identical to SEQ ID NO: 1158
  Synthetic polypeptide
  MOD_RES (2)..(2): Xaa is Aib
  MISC_FEATURE (10)..(10): 14 Carbon fatty acyl group covalently attached to Lysine
  MOD_RES (20)..(20): Xaa is Aib
  MISC_FEATURE (24)..(24): PEG (40kDa) covalently attached to Cysteine
  MISC_FEATURE (39)..(39): C-terminal amidation

SEQ ID NO: 1163 - protein, 41 aa, Artificial Sequence; identical to SEQ ID NO: 1160
  Synthetic polypeptide
  MOD_RES (2)..(2): Xaa is Aib
  MOD_RES (20)..(20): Xaa is Aib
  MISC_FEATURE (40)..(40): 14 Carbon fatty acyl group covalently attached to Lysine
  MISC_FEATURE (41)..(41): PEG (40kDa) covalently attached to Cysteine
  MISC_FEATURE (41)..(41): C-terminal amidation

SEQ ID NO: 1164 - protein, 41 aa, Artificial Sequence; identical to SEQ ID NO: 1160
  Synthetic polypeptide
  MOD_RES (2)..(2): Xaa is Aib
  MOD_RES (20)..(20): Xaa is Aib
  MISC_FEATURE (41)..(41): PEG (40kDa) covalently attached to Cysteine
  MISC_FEATURE (41)..(41): C-terminal amidation

SEQ ID NO: 1165 - protein, 40 aa, Artificial Sequence
  Synthetic polypeptide
  MOD_RES (2)..(2): Xaa is Aib
  MISC_FEATURE (40)..(40): 14 Carbon fatty acyl group covalently attached to Lysine
  MISC_FEATURE (40)..(40): C-terminal amidation
HXQGTFTSDYSKYLDEQAAKEFICWLMNGGPSSGAPPPSK

SEQ ID NO: 1166 - protein, 40 aa, Artificial Sequence; identical to SEQ ID NO: 1100
  Synthetic polypeptide
  MOD_RES (2)..(2): Xaa is Aib
  MOD_RES (20)..(20): Xaa is Aib
  MISC_FEATURE (24)..(24): PEG (40kDa) covalently attached to Cysteine
  MISC_FEATURE (40)..(40): 14 Carbon fatty acyl group covalently attached to Lysine
  MISC_FEATURE (40)..(40): C-terminal amidation

SEQ ID NO: 1167 - protein, 40 aa, Artificial Sequence
  Synthetic polypeptide
  MOD_RES (2)..(2): Xaa is Aib
  MOD_RES (16)..(16): Xaa is Aib
  MISC_FEATURE (40)..(40): C-terminal amidation
YXQGTFTSDYSIYLDXQAAKEFVNWLLAGGPSSGAPPPSC

SEQ ID NO: 1168 - protein, 40 aa, Artificial Sequence
  Synthetic polypeptide
  MOD_RES (2)..(2): Xaa is Aib
  MOD_RES (16)..(16): Xaa is Aib
  MISC_FEATURE (40)..(40): C-terminal amidation
YXQGTFTSDYSIYLDXQAAQEFVNWLLAGGPSSGAPPPSC

SEQ ID NO: 1169 - protein, 40 aa, Artificial Sequence
  Synthetic polypeptide
  MOD_RES (2)..(2): Xaa is Aib
  MOD_RES (12)..(16): Lactam bridge between residues 12 and 16
  MOD_RES (20)..(20): Xaa is Aib
  MOD_RES (40)..(40): C-terminal amidation
YXQGTFTSDYSKYLDEQAAXEFVNWLLAGGPSSGAPPPSC

SEQ ID NO: 1170 - protein, 10 aa, Artificial Sequence
  Synthetic polypeptide
GPSSGAPPPK

SEQ ID NO: 1171 - protein, 11 aa, Artificial Sequence
  Synthetic polypeptide
  MOD_RES (1)..(1): Xaa is Gly or a small, aliphatic or non-polar or slightly polar amino acid
XGPSSGAPPPK

SEQ ID NO: 1172 - protein, 12 aa, Artificial Sequence
  Synthetic  polypeptide
  MOD_RES (1)..(1): Xaa is Gly or a small, aliphatic or non-polar or slightly polar amino acid
XGPSSGAPPPSK

SEQ ID NO: 1173 - protein, 40 aa, Artificial Sequence; identical to SEQ ID NO: 1167
  Synethic polypeptide
  MOD_RES (2)..(2): Xaa is Aib
  MOD_RES (16)..(16): Xaa is Aib
  MISC_FEATURE (40)..(40): PEG (40kDa) covalently attached to Cysteine
  MISC_FEATURE (40)..(40): C-terminal amidation

SEQ ID NO: 1174 - protein, 40 aa, Artificial Sequence; identical to SEQ ID NO: 1168
  Synthetic polypeptide
  MOD_RES (2)..(2): Xaa is Aib
  MOD_RES (16)..(16): Xaa is Aib
  MISC_FEATURE (40)..(40): PEG (40kDa) covalently attached to Cysteine
  MISC_FEATURE (40)..(40): C-terminal amidation

SEQ ID NO: 1175 - protein, 40 aa, Artificial Sequence; identical to SEQ ID NO: 1121
  Synthetic polypeptide
  MOD_RES (2)..(2): Xaa is Aib
  MOD_RES (16)..(16): Xaa is Aib
  MOD_RES (20)..(20): Xaa is Aib
  MISC_FEATURE (40)..(40): C-terminal amidation

SEQ ID NO: 1176 - protein, 40 aa, Artificial Sequence
  Synthetic polypeptide
  MOD_RES (2)..(2): Xaa is Aib
  MOD_RES (20)..(20): Xaa is Aib
  MISC_FEATURE (40)..(40): C-terminal amidation
YXQGTFTSDYSIYLDEQAAXEFVNWLLAGGPSSGAPPPSC

SEQ ID NO: 1177 - protein, 29 aa, Artificial Sequence
  Synthetic polypeptide
  MOD_RES (2)..(2): Xaa is Aib
  MOD_RES (20)..(20): Xaa is Aib
  MISC_FEATURE (29)..(29): C-terminal amidation
YXQGTFTSDYSIYLDEQAAXEFVCWLLAG

SEQ ID NO: 1178 - protein, 29 aa, Artificial Sequence
  Synthetic polypeptide
  MISC_FEATURE: C-terminal amidation
  MOD_RES (2)..(2): Xaa is Aib
  MOD_RES (20)..(20): Xaa is Aib
YXQGTFTSDYSIYLDSQAAXEFVCWLLAG

SEQ ID NO: 1179 - protein, 30 aa, Artificial Sequence
  Synthetic polypeptide
  MOD_RES (2)..(2): Xaa is Aib
  MISC_FEATURE (24)..(24): PEG (40kDa) covalently attached to Cysteine
HXEGTFTSDVSSYLEEQAAKEFICWLVKGR

SEQ ID NO: 1180 - protein, 42 aa, Artificial Sequence
  Synthetic polypeptide
  MISC_FEATURE (24)..(24): Substituted amino acid covalently linked to hydrophilic group
YAPGTFISDYSIAMDKIHQQDFVXWLLAQKGKKNWLKHNITQ

SEQ ID NO: 1181 - protein, 40 aa, Artificial Sequence
  Synthetic polypeptide
  MOD_RES (2)..(2): Xaa is Aib
  MISC_FEATURE (16)..(20): Lactam bridge between residues 16 and 20
  MISC_FEATURE (40)..(40): Substituted amino acid covalentaly linked to hydrophilic group
YXQGTFTSDYSIYLDEQAAKEFVNWLLAGGPSSGAPPPSX

SEQ ID NO: 1182 - protein, 29 aa, Artificial Sequence
  Synthetic polypeptide
  MOD_RES (2)..(2): Xaa is Aib
  MISC_FEATURE (16)..(20): Lactam bridge between residues 16 and 20
  MISC_FEATURE (24)..(24): Substituted amino acid covalently linked to hydrophilic group
  misc_feature (29)..(29): Xaa can be any naturally occurring amino acid
YXQGTFTSDYSIYLDEQAAKEFVXWLLAX

SEQ ID NO: 1183 - protein, 39 aa, Artificial Sequence
  Synthetic polypeptide
  MOD_RES (2)..(2): Xaa is Aib
  MISC_FEATURE (16)..(20): Lactam bridge between residues 16 and 20
  MISC_FEATURE (24)..(24): Substituted amino acid covalently linked to hydrophilic group
YXQGTFTSDYSIYLDEQAAKEFVXWLLAGGPSSGAPPPS

SEQ ID NO: 1184 - protein, 40 aa, Artificial Sequence
  Synthetic polypeptide
  MOD_RES (2)..(2): Xaa is Aib
  MISC_FEATURE (16)..(20): Lactam bridge between residues 16 and 20
  MISC_FEATURE (40)..(40): Substituted amino acid covalently linked to hydrophilic group
YXEGTFTSDYSIYLDEQAAKEFVNWLLAGGPSSGAPPPSX

SEQ ID NO: 1185 - protein, 29 aa, Artificial Sequence
  Sythetic polypeptide
  MOD_RES (2)..(2): Xaa is Aib
  MISC_FEATURE (16)..(20): Lactam bridge between residues 16 and 20
  MISC_FEATURE (24)..(24): Substituted amino acid covalently linked to hydrophilic group
YXQGTFISDYSIYLDEQAAKEFVXWLLAG

SEQ ID NO: 1186 - protein, 40 aa, Artificial Sequence
  Synthetic polypeptide
  MOD_RES (2)..(2): Xaa is Aib
  MISC_FEATURE (16)..(20): Lactam bridge between residues 16 and 20
  MISC_FEATURE (40)..(40): Substituted amino acid covalently linked to hydrophilic group
YXQGTFISDYSIYLDEQAAKEFVNWLLAGGPSSGAPPPSX

SEQ ID NO: 1187 - protein, 29 aa, Artificial sequence
  Synthetic polypeptide
  MOD_RES (2)..(2): Xaa is Aib
  MISC_FEATURE (16)..(20): Lactam bridge between residues 16 and 20
  MISC_FEATURE (24)..(24): Substituted amino acid covalently linked to hydrophilic group
YXQGTFTSDYSIYLDEQAAKEFVXWLMNG

SEQ ID NO: 1188 - protein, 40 aa, Artificial sequence
  Synthetic polypeptide
  MOD_RES (2)..(2): Xaa is Aib
  MISC_FEATURE (16)..(20): Lactam bridge between residues 16 and 20
  MISC_FEATURE (40)..(40): Substitute amino acid covalently linked to hydrophilic group
YXQGTFVSDYSIYLDEQAAKEFVNWLLAGGPSSGAPPPSX

SEQ ID NO: 1189 - protein, 40 aa, Artificial sequence
  Synthetic polypeptide
  MOD_RES (2)..(2): Xaa is Aib
  MISC_FEATURE (16)..(20): Lactam bridge between residues 16 and 20
  MOD_RES (27)..(27): Xaa is Nle
  MISC_FEATURE (40)..(40): Substituted amino acid covalently linked to hydrophilic group
YXQGTFTSDYSIYLDEQAAKEFVNWLXAGGPSSGAPPPSX

SEQ ID NO: 1190 - protein, 40 aa, Artificial sequence
  Synthetic polypeptide
  MOD_RES (2)..(2): Xaa is Aib
  MISC_FEATURE (16)..(20): Lactam bridge between residues 16 and 20
  MISC_FEATURE (40)..(40): Substituted amino acid covalently linked to hydrophilic group
YXEGTFTSDYSIYLDEQAAKEFVNWLLAGRPSSGAPPPSX

SEQ ID NO: 1191 - protein, 43 aa, Artificial sequence
  Synthetic polypeptide
  MOD_RES (2)..(2): Xaa is Aib
  MISC_FEATURE (16)..(20): Lactam bridge between residues 16 and 20
  MISC_FEATURE (43)..(43): Substituted amino acid covalently linked to hydrophilic group
YXEGTFTSDYSIYLDEQAAKEFVNWLLAGKGKKNWLKHNITQX

SEQ ID NO: 1192 - protein, 40 aa, Artificial Sequence
  Synthetic polypeptide
  MOD_RES (2)..(2): Xaa is Aib
  MOD_RES (20)..(20): Xaa is Aib
  MISC_FEATURE (40)..(40): Substituted amino acid covalently linked to hydrophilic group
  MISC_FEATURE (40)..(40): C-terminal amidation
YXEGTFTSDYSIYLDKQAAXEFVNWLLAGGPSSGAPPPSX

SEQ ID NO: 1193 - protein, 40 aa, Artificial Sequence
  Synthetic polypeptide
  MOD_RES (2)..(2): Xaa is Aib
  MOD_RES (20)..(20): Xaa is Aib
  MISC_FEATURE (24)..(24): Substituted amino acid covalently linked to hydrophilic group
  MISC_FEATURE (40)..(40): C-terminal amidation
YXEGTFTSDYSIYLDKQAAXEFVXWLLAGGPSSGAPPPSK

SEQ ID NO: 1194 - protein, 40 aa, Artificial Sequence
  Synthetic polypeptide
  MOD_RES (2)..(2): Xaa is Aib
  MOD_RES (20)..(20): Xaa is Aib
  MISC_FEATURE (24)..(24): Substituted amino acid covalently linked to hydrophilic group
  MISC_FEATURE (40)..(40): Substitute amino acid covalently linked to an acyl or alkyl group
  MISC_FEATURE (40)..(40): C-terminal amidation
YXEGTFTSDYSIYLDKQAAXEFVXWLLAGGPSSGAPPPSX

SEQ ID NO: 1195 - protein, 40 aa, Artificial Sequence; identical to SEQ ID NO: 1192
  Synthetic polypeptide
  MOD_RES (2)..(2): Xaa is Aib
  MOD_RES (20)..(20): Xaa is Aib
  MISC_FEATURE (40)..(40): Substituted amino acid covalently linked to an acyl or alkyl group
  MISC_FEATURE (40)..(40): C-terminal amidation

SEQ ID NO: 1196 - protein, 40 aa, Artificial Sequence
  Synthetic polypeptide
  MOD_RES (2)..(2): Xaa is Aib
  MOD_RES (20)..(20): Xaa is Aib
  MISC_FEATURE (40)..(40): Substituted amino acid covalently linked to hydrophilic group
  MISC_FEATURE (40)..(40): C-terminal amidation
YXQGTFTSDYSIYLDKQAAXEFVNWLLAGGPSSGAPPPSX

SEQ ID NO: 1197 - protein, 39 aa, Artificial Sequence
  Synthetic polypeptide
  MOD_RES (2)..(2): Xaa is Aib
  MOD_RES (20)..(20): Xaa is Aib
  MISC_FEATURE (24)..(24): Substituted amino acid covalently linked to acyl or alkyl group
  MISC_FEATURE (39)..(39): C-terminal amidation
YXEGTFTSDYSIYLDKQAAXEFVXWLLAGGPSSGAPPPS

SEQ ID NO: 1198 - protein, 39 aa, Artificial Sequence
  Synthetic polypeptide
  MOD_RES (2)..(2): Xaa is Aib
  MISC_FEATURE (10)..(10): Substituted amino acid covalently linked to acyl or alkyl group
  MOD_RES (20)..(20): Xaa is Aib
  MISC_FEATURE (39)..(39): C-terminal amidation
YXEGTFTSDXSIYLDKQAAXEFVNWLLAGGPSSGAPPPS

SEQ ID NO: 1199 - protein, 40 aa, Artificial Sequence; identical to SEQ ID NO: 1196
  Synthetic polypeptide
  MOD_RES (2)..(2): Xaa is Aib
  MOD_RES (20)..(20): Xaa is Aib
  MISC_FEATURE (40)..(40): Substituted amino acid covalently linked to acyl or alkyl group
  MISC_FEATURE (40)..(40): C-terminal amidation

SEQ ID NO: 1200 - protein, 29 aa, Artificial Sequence
  Synthetic polypeptide
  MOD_RES (2)..(2): Xaa is Aib
  MOD_RES (20)..(20): Xaa is Aib
  MISC_FEATURE (24)..(24): Substituted amino acid covalently linked to hydrophilic group
  MISC_FEATURE (29)..(29): C-terminal amidation
YXQGTFTSDYSIYLDKQAAXEFVXWLLAG

SEQ ID NO: 1201 - protein, 29 aa, Artificial Sequence
  Synthetic polypeptide
  MOD_RES (2)..(2): Xaa is Aib
  MISC_FEATURE (10)..(10): Substituted amino acid covalently linked to acyl or alkyl group
  MOD_RES (20)..(20): Xaa is Aib
  MISC_FEATURE (29)..(29): C-terminal amidation
YXEGTFTSDXSIYLDKQAAXEFVNWLLAG

SEQ ID NO: 1202 - protein, 40 aa, Artificial Sequence
  Synthetic polypeptide
  MOD_RES (2)..(2): Xaa is Aib
  MOD_RES (20)..(20): Xaa is Aib
  MISC_FEATURE (40)..(40): Substituted amino acid covalently linked acyl or alkyl group
  MISC_FEATURE (40)..(40): C-terminal amidation
YXQGTFTSDYSIYLDKQAAXEFVCWLLAGGPSSGAPPPSX

SEQ ID NO: 1203 - protein, 40 aa, Artificial Sequence
  Synthetic polypeptide
  MOD_RES (2)..(2): Xaa is Aib
  MOD_RES (20)..(20): Xaa is Aib
  MISC_FEATURE (24)..(24): Substituted amino acid covalently linked to hydrophilic group
  MISC_FEATURE (40)..(40): Substituted amino acid covalently linked to acyl or alkyl group
  MISC_FEATURE (40)..(40): C-terminal amidation
YXQGTFTSDYSIYLDKQAAXEFVXWLLAGGPSSGAPPPSX

SEQ ID NO: 1204 - protein, 40 aa, Artificial Sequence
  Synthetic polypeptide
  MOD_RES (2)..(2): Xaa is Aib
  MOD_RES (20)..(20): Xaa is Aib
  MISC_FEATURE (24)..(24): Substituted amino acid covalently linked to hydrophilic group
  MISC_FEATURE (40)..(40): C-terminal amidation
YXQGTFTSDYSIYLDKQAAXEFVXWLLAGGPSSGAPPPSK

SEQ ID NO: 1205 - protein, 40 aa, Artificial Sequence; identical to SEQ ID NO: 1192
  Synthetic polypeptide
  MOD_RES (2)..(2): Xaa is Aib
  MOD_RES (20)..(20): Xaa is Aib
  MISC_FEATURE (40)..(40): Substituted amino acid covalently linked to hydrophilic group
  MISC_FEATURE (40)..(40): C-terminal amidation

SEQ ID NO: 1206 - protein, 40 aa, Artificial Sequence; identical to SEQ ID NO: 1154
  Synthetic polypeptide
  MOD_RES (2)..(2): Xaa is Aib
  MOD_RES (20)..(20): Xaa is Aib
  MISC_FEATURE (40)..(40): Substituted amino acid covalently linked to acyl or alkyl group
  MISC_FEATURE (40)..(40): C-terminal amidation

SEQ ID NO: 1207 - protein, 40 aa, Artificial Sequence
  Synthetic polypeptide
  MOD_RES (2)..(2): Xaa is Aib
  MOD_RES (20)..(20): Xaa is Aib
  MISC_FEATURE (40)..(40): Substituted amino acid covalently linked to acyl or alkyl group
  MISC_FEATURE (40)..(40): C-terminal amidation
YXQGTFTSDYSIYLDKQAAXEFVCWLMNGGPSSGAPPPSX

SEQ ID NO: 1208 - protein, 40 aa, Artificial Sequence
  Synthetic polypeptide
  MOD_RES (2)..(2): Xaa is Aib
  MOD_RES (20)..(20): Xaa is Aib
  MISC_FEATURE (24)..(24): Substituted amino acid covalently linked to hydrophilic group
  MISC_FEATURE (40)..(40): Substituted amino acid covalently linked to acyl or alkyl group
  MISC_FEATURE (40)..(40): C-terminal amidation
YXQGTFTSDYSIYLDKQAAXEFVXWLMNGGPSSGAPPPSX

SEQ ID NO: 1209 - protein, 40 aa, Artificial Sequence; identical to SEQ ID NO: 1154
  Synthetic polypeptide
  MOD_RES (2)..(2): Xaa is Aib
  MOD_RES (20)..(20): Xaa is Aib
  MISC_FEATURE (40)..(40): Substituted amino acid covalently linked to acyl or alkyl group
  MISC_FEATURE (40)..(40): C-terminal amidation

SEQ ID NO: 1210 - protein, 40 aa, Artificial Sequence; identical to SEQ ID NO: 1196
  Synthetic polypeptide
  MOD_RES (2)..(2): Xaa is Aib
  MOD_RES (20)..(20): Xaa is Aib
  MISC_FEATURE (40)..(40): Substituted amino acid covalently linked to acyl or alkyl group
  MISC_FEATURE (40)..(40): C-terminal amidation

SEQ ID NO: 1211 - protein, 40 aa, Artificial Sequence; identical to SEQ ID NO: 1202
  Synthetic polypeptide
  MOD_RES (2)..(2): Xaa is Aib
  MOD_RES (20)..(20): Xaa is Aib
  MISC_FEATURE (40)..(40): Substituted amino acid covalently linked to acyl or alkyl group
  MISC_FEATURE (40)..(40): C-terminal amidation

SEQ ID NO: 1212 - protein, 40 aa, Artificial Sequence; identical to SEQ ID NO: 1154
  Synthetic polypeptide
  MOD_RES (2)..(2): Xaa is Aib
  MOD_RES (20)..(20): Xaa is Aib
  MISC_FEATURE (40)..(40): Substituted amino acid covalently linked to acyl or alkyl group
  MISC_FEATURE (40)..(40): C-terminal amidation

SEQ ID NO: 1213 - protein, 40 aa, Artificial Sequence; identical to SEQ ID NO: 1193
  Synthetic polypeptide
  MOD_RES (2)..(2): Xaa is Aib
  MOD_RES (20)..(20): Xaa is Aib
  MISC_FEATURE (24)..(24): Substituted amino acid covalently linked to hydrophilic group
  MISC_FEATURE (40)..(40): C-terminal amidation

SEQ ID NO: 1214 - protein, 40 aa, Artificial Sequence; identical to SEQ ID NO: 1154
  Synthetic polypeptide
  MOD_RES (2)..(2): Xaa is Aib
  MOD_RES (20)..(20): Xaa is Aib
  MISC_FEATURE (40)..(40): Substituted amino acid covalently linked to acyl or alkyl group
  MISC_FEATURE (40)..(40): C-terminal amidation

SEQ ID NO: 1215 - protein, 40 aa, Artificial Sequence; identical to SEQ ID NO: 1194
  Synthetic polypeptide
  MOD_RES (2)..(2): Xaa is Aib
  MOD_RES (20)..(20): Xaa is Aib
  MISC_FEATURE (24)..(24): Substituted amino acid covalently linked to hydrophilic group
  MISC_FEATURE (40)..(40): Substituted amino acid covalently linked to acyl or alkyl group
  MISC_FEATURE (40)..(40): C-terminal amidation

SEQ ID NO: 1216 - protein, 40 aa, Artificial Sequence; identical to SEQ ID NO: 1194
  Synthetic polypeptide
  MOD_RES (2)..(2): Xaa is Aib
  MOD_RES (20)..(20): Xaa is Aib
  MISC_FEATURE (24)..(24): Substituted amino acid covalently linked to hydrophilic group
  MISC_FEATURE (40)..(40): C-terminal amidation

SEQ ID NO: 1217 - protein, 39 aa, Artificial Sequence
  Synthetic polypeptide
  MOD_RES (2)..(2): Xaa is Aib
  MISC_FEATURE (10)..(10): Substituted amino acid covalently linked to acyl or alkyl group
  MOD_RES (20)..(20): Xaa is Aib
  MISC_FEATURE (40)..(40): C-terminal amidation
YXEGTFTSDXSIYLDKQAAXEFVCWLLAGGPSSGAPPPS

SEQ ID NO: 1218 - protein, 41 aa, Artificial Sequence
  Synthetic polypeptide
  MOD_RES (2)..(2): Xaa is Aib
  MOD_RES (20)..(20): Xaa is Aib
  MISC_FEATURE (40)..(40): Substituted amino acid covalently linked to acyl or alkyl group
  MISC_FEATURE (41)..(41): C-terminal amidation
YXEGTFTSDYSIYLDKQAAXEFVNWLLAGGPSSGAPPPSXC

SEQ ID NO: 1219 - protein, 39 aa, Artificial Sequence
  Synthetic polypeptide
  MOD_RES (2)..(2): Xaa is Aib
  MISC_FEATURE (10)..(10): Substituted amino acid covalently linked to acyl or alkyl group
  MOD_RES (20)..(20): Xaa is Aib
  MISC_FEATURE (24)..(24): Substituted amino acid covalently linked to hydrophilic group
  MISC_FEATURE (39)..(39): C-terminal amidation
YXEGTFTSDXSIYLDKQAAXEFVXWLLAGGPSSGAPPPS

SEQ ID NO: 1220 - protein, 41 aa, Artificial Sequence
  Synthetic polypeptide
  MOD_RES (2)..(2): Xaa is Aib
  MOD_RES (20)..(20): Xaa is Aib
  MISC_FEATURE (40)..(40): Substituted amino acid covalently linked to acyl or alkyl group
  MISC_FEATURE (41)..(41): Substituted amino acid covalently linked to hydrophilic group
  MISC_FEATURE (41)..(41): C-terminal amidation
YXEGTFTSDYSIYLDKQAAXEFVNWLLAGGPSSGAPPPSXX

SEQ ID NO: 1221 - protein, 41 aa, Artificial Sequence
  Synthetic polypeptide
  MOD_RES (2)..(2): Xaa is Aib
  MOD_RES (20)..(20): Xaa is Aib
  MISC_FEATURE (41)..(41): Substituted amino acid covalently linked to hydrophilic group
  MISC_FEATURE (41)..(41): C-terminal amidation
YXEGTFTSDYSIYLDKQAAXEFVNWLLAGGPSSGAPPPSKX

SEQ ID NO: 1222 - protein, 40 aa, Artificial Sequence
  Synthetic polypeptide
  MOD_RES (2)..(2): Xaa is Aib
  MISC_FEATURE (40)..(40): Substituted amino acid covalently linked to acyl or alkyl group
  MISC_FEATURE (40)..(40): C-terminal amidation
HXQGTFTSDYSKYLDEQAAKEFICWLMNGGPSSGAPPPSX

SEQ ID NO: 1223 - protein, 40 aa, Artificial Sequence; identical to SEQ ID NO: 1194
  Synthetic polypeptide
  MOD_RES (2)..(2): Xaa is Aib
  MOD_RES (20)..(20): Xaa is Aib
  MISC_FEATURE (24)..(24): Substituted amino acid covalently linked to hydrophilic group
  MISC_FEATURE (40)..(40): Substituted amino acid covalently linked to acyl or alkyl group
  MISC_FEATURE (40)..(40): C-terminal amidation

SEQ ID NO: 1224 - protein, 40 aa, Artificial Sequence
  Synthetic polypeptide
  MOD_RES (2)..(2): Xaa is Aib
  MOD_RES (16)..(16): Xaa is Aib
  MISC_FEATURE (40)..(40): Substituted amino acid covalently linked to hydrophilic group
  MISC_FEATURE (40)..(40): C-terminal amidation
YXQGTFTSDYSIYLDXQAAKEFVNWLLAGGPSSGAPPPSX

SEQ ID NO: 1225 - protein, 40 aa, Artificial Sequence
  Synthetic polypeptide
  MOD_RES (2)..(2): Xaa is Aib
  MOD_RES (16)..(16): Xaa is Aib
  MISC_FEATURE (40)..(40): Substituted amino acid covalently linked to hydrophilic group
  MISC_FEATURE (40)..(40): C-terminal amidation
YXQGTFTSDYSIYLDXQAAQEFVNWLLAGGPSSGAPPPSX

SEQ ID NO: 1226 - protein, 30 aa, Artificial Sequence; identical to SEQ ID NO: 1179
  Synthetic polypeptide
  MOD_RES (2)..(2): Xaa is Aib
  MISC_FEATURE (24)..(24): Substituted amino acid covalently linked to hydrophilic group

SEQ ID NO: 1227 - protein, 29 aa, Artificial Sequence
  Synthetic polypeptide
  MOD_RES (2)..(2): Xaa is Aib
  MOD_RES (20)..(20): Xaa is Aib
  MISC_FEATURE (29)..(29): C-terminal amidation
YXQGTFTSDYSIYLDKQAAXEFVNWLLAG

SEQ ID NO: 1228 - protein, 29 aa, Artificial Sequence
  Synthetic polypeptide
  MOD_RES (2)..(2): Xaa is D-Ser, D-Ala, Val, Gly, N-Methyl Ser, N-Methyl Ala, or Aib
  MOD_RES (16)..(16): Xaa is Lys, Glu, Ser, Orn, Dab, Aib or any alpha, alpha-disubstituted amino acid
  MOD_RES (20)..(20): Xaa is any alpha, alpha-disubstituted amino acid
  MOD_RES (27)..(27): Xaa is Ile, Leu, or Nle
  MOD_RES (28)..(28): Xaa is Ala or Gly
  MOD_RES (29)..(29): Xaa is Thr, Ala, or Gly
  MISC_FEATURE (29)..(29): C-terminal amidation
YXQGTFTSDYSIYLDXQAAXEFVNWLXXX

SEQ ID NO: 1229 - protein, 29 aa, Artificial Sequence
  Synthetic polypeptide
  MOD_RES (2)..(2): Xaa is Aib
  MOD_RES (20)..(20): Xaa is Aib
  MISC_FEATURE (29)..(29): C-terminal amidation
YXQGTFTSDYSKYLDKRRAXDFVQWLLAG

SEQ ID NO: 1230 - protein, 29 aa, Artificial Sequence
  Synthetic polypeptide
  MOD_RES (2)..(2): Xaa is D-Ser, DAla, Val, Gly, N-Methyl Ser, N-Methyl Ala, or Aib
  MOD_RES (16)..(16): Xaa is Lys, Glu, Ser, Orn, Dab, Aib or any alpha, alpha-disubstituted amino acid
  MOD_RES (20)..(20): Xaa is any alpha, alpha-disubstituted amino acid
  MOD_RES (27)..(27): Xaa is Ile, Leu, or Nle
  MOD_RES (28)..(28): Xaa is Ala or Gly
  MOD_RES (29)..(29): Xaa is Thr, Ala, or Gly
  MOD_RES (29)..(29): C-terminal amidation
YXQGTFTSDYSKYLDXRRAXDFVQWLXXX

SEQ ID NO: 1231 - protein, 41 aa, Artificial Sequence; identical to SEQ ID NO: 1160
  Synthetic polypeptide
  MISC_FEATURE: Homodimer
  MOD_RES (2)..(2): Xaa is Aib
  MOD_RES (20)..(20): Xaa is Aib
  MISC_FEATURE (40)..(40): 14 Carbon fatty acyl group covalently bound to Lysine
  MOD_RES (40)..(40): C-terminal amidation
  DISULFID (41)..(41): Disulfide bond formed with Cys residue of a second peptide having the same structure.

SEQ ID NO: 1232 - protein, 40 aa, Artificial Sequence
  Synthetic polypeptide
  MOD_RES (2)..(2): Xaa is Aib
  MOD_RES (20)..(20): Xaa is Aib
  MISC_FEATURE (40)..(40): C-terminal amidation
YXQGTFTSDYSIYLDKQAAXEFVNWLMNGGPSSGAPPPSK

SEQ ID NO: 1233 - protein, 40 aa, Artificial Sequence
  Synthetic polypeptide
  MOD_RES (2)..(2): Xaa is Aib
  MOD_RES (20)..(20): Xaa is Aib
  MISC_FEATURE (40)..(40): C-terminal amidation
YXQGTFISDYSIYLDKQAAXEFVNWLLAGGPSSGAPPPSK

SEQ ID NO: 1234 - protein, 40 aa, Artificial Sequence; identical to SEQ ID NO: 1233
  Synthetic polypeptide
  MOD_RES (2)..(2): Xaa is Aib
  MOD_RES (20)..(20): Xaa is Aib
  MISC_FEATURE (40)..(40): 16 Carbon fatty acyl group covalently bound to Lysine
  MISC_FEATURE (40)..(40): C-terminal amidation

SEQ ID NO: 1235 - protein, 40 aa, Artificial Sequence; identical to SEQ ID NO: 1104
  Synthetic polypeptide
  MOD_RES (2)..(2): Xaa is Aib
  MOD_RES (20)..(20): Xaa is Aib
  MISC_FEATURE (40)..(40): 16 Carbon fatty acyl group covalently bound to Lysine via a dipeptide spacer
  MISC_FEATURE (40)..(40): C-terminal amidation

SEQ ID NO: 1236 - protein, 40 aa, Artificial Sequence; identical to SEQ ID NO: 1123
  Synthetic polypeptide
  MOD_RES (2)..(2): Xaa is Aib
  MOD_RES (20)..(20): Xaa is Aib
  MISC_FEATURE (40)..(40): 16 Carbon fatty acyl group covalently bound to Lysine via a dipeptide spacer
  MISC_FEATURE (40)..(40): C-terminal amidation

SEQ ID NO: 1237 - protein, 40 aa, Artificial Sequence
  Synthetic polypeptide
  MOD_RES (2)..(2): Xaa is Aib
  MISC_FEATURE (10)..(10): 16 Carbon fatty acyl group covalently bound to Lysine via dipeptide spacer
  MOD_RES (20)..(20): Xaa is Aib
  MISC_FEATURE (40)..(40): C-terminal amidation
YXEGTFTSDKSIYLDKQAAXEFVNWLLAGGPSSGAPPPSK

SEQ ID NO: 1238 - protein, 41 aa, Artificial Sequence; identical to SEQ ID NO: 1160
  Synthetic polypeptide
  MISC_FEATURE: Homodimer
  MOD_RES (2)..(2): Xaa is Aib
  MOD_RES (20)..(20): Xaa is Aib
  MISC_FEATURE (40)..(40): 14 Carbon fatty acyl group covelently bound to Lysine
  MISC_FEATURE (41)..(41): C-terminal amidation
  MISC_FEATURE (41)..(41): Cys residue covalently attached to 20 kDa PEG which is in turn covalently attached to a Cys residue of a second peptide having the same structure

SEQ ID NO: 1239 - protein, 41 aa, Artificial Sequence; identical to SEQ ID NO: 1160
  Synthetic polypeptide
  MISC_FEATURE: homodimer
  MOD_RES (2)..(2): Xaa is Aib
  MOD_RES (20)..(20): Xaa is Aib
  MISC_FEATURE (40)..(40): 14 Carbon fatty acyl group covalently bound to Lysine
  MISC_FEATURE (41)..(41): PEG (5kDa) covalently bound to Cysteine
  MISC_FEATURE (41)..(41): C-terminal amidation
  MISC_FEATURE (41)..(41): Cys residue covalently attached to 5 kDa PEG which is in turn covalently attached to a Cys residue of a second peptide having the same structure

SEQ ID NO: 1240 - protein, 29 aa, Artificial Sequence
  Synthetic polypeptide
  MOD_RES (3)..(3): Xaa is a Glutamine analog
  MOD_RES (27)..(27): Xaa is Nle
HSXGTFTSDYSKYLDTRRAAEFVAWLXDE

SEQ ID NO: 1241 - protein, 29 aa, Artificial Sequence
  Synthetic polypeptide
  MOD_RES (3)..(3): Xaa is a Glutamine analog
  MOD_RES (16)..(16): Xaa is Aib
HSXGTFTSDYSKYLDXRRAADFVAWLMDE

SEQ ID NO: 1242 - protein, 29 aa, Artificial Sequence
  Synthetic polypeptide
  MOD_RES (27)..(27): Xaa is Nle
HSQGTFTSDYSKYLDTRRAAEFVAWLXDE

SEQ ID NO: 1243 - protein, 29 aa, Artificial Sequence
  Synthetic peptide
  MOD_RES (3)..(3): Xaa is Acetamidomethyl-cysteine
  MOD_RES (27)..(27): Xaa is Nle
HSXGTFTSDYSKYLDTRRAAEFVAWLXDE

SEQ ID NO: 1244 - protein, 29 aa, Artificial Sequence
  Synthetic peptide
  MOD_RES (3)..(3): Xaa is Acetyldiaminobutanoic acid
  MOD_RES (27)..(27): Xaa is Nle
HSXGTFTSDYSKYLDTRRAAEFVAWLXDE

SEQ ID NO: 1245 - protein, 29 aa, Artificial Sequence
  Synthetic polypeptide
  MOD_RES (3)..(3): Xaa is carbamoyldiaminopropanoic acid
  MOD_RES (27)..(27): Xaa is Nle
HSXGTFTSDYSKYLDTRRAAEFVAWLXDE

SEQ ID NO: 1246 - protein, 29 aa, Artificial Sequence
  Synthetic polypeptide
  MOD_RES (3)..(3): Xaa is Methylglutamine
  MOD_RES (27)..(27): Xaa is Nle
HSXGTFTSDYSKYLDTRRAAEFVAWLXDE

SEQ ID NO: 1247 - protein, 29 aa, Artificial Sequence
  Synthetic peptide
  MOD_RES (3)..(3): Xaa is Methionine sulfoxide
  MOD_RES (27)..(27): Xaa is Nle
HSXGTFTSDYSKYLDTRRAAEFVAWLXDE

SEQ ID NO: 1248 - protein, 29 aa, Artificial Sequence
  Synthetic peptide
  MOD_RES (3)..(3): Xaa is Acetylornithine
  MOD_RES (27)..(27): Xaa is Nle
HSXGTFTSDYSKYLDTRRAAEFVAWLXDE

SEQ ID NO: 1249 - protein, 29 aa, Artificial Sequence
  Synthetic polypeptide
  MOD_RES (16)..(16): Xaa is Aib
HSQGTFTSDYSKYLDXRRAADFVAWLMDE

SEQ ID NO: 1250 - protein, 29 aa, Artificial Sequence
  Synthetic polypeptide
  MOD_RES (3)..(3): Xaa is Acetyldiaminobutanoic acid
  MOD_RES (16)..(16): Xaa is Aib
HSXGTFTSDYSKYLDXRRAADFVAWLMDE

SEQ ID NO: 1251 - protein, 29 aa, Artificial Sequence
  Synthetic polypeptide
  MOD_RES (3)..(3): Xaa is Methylglutamine
  MOD_RES (16)..(16): Xaa is Aib
HSXGTFTSDYSKYLDXRRAADFVAWLMDE

SEQ ID NO: 1252 - protein, 29 aa, Artificial Sequence
  Synthetic polypeptide
HSQGTFTSDYSKYLDSRRAQDFVQWLMDT

SEQ ID NO: 1253 - protein, 29 aa, Artificial Sequence
  Synthetic polypeptide
  MOD_RES (3)..(3): Xaa is Acetyldiaminobutanoic acid
  MOD_RES (16)..(16): Xaa is Aib
HSXGTFTSDYSKYLDXRRAADFVAWLLDE

SEQ ID NO: 1254 - protein, 39 aa, Artificial Sequence; identical to SEQ ID NO: 604
  Synthetic polypeptide
  MOD_RES (3)..(3): Xaa is Acetyldiaminobutanoic acid
  MOD_RES (16)..(16): Xaa is Aib
  MISC_FEATURE (39)..(39): C-terminal amidation

SEQ ID NO: 1255 - protein, 29 aa, Artificial Sequence
  Synthetic polypeptide
  MOD_RES (3)..(3): Xaa is Acetyldiaminobutanoic acid
  MOD_RES (16)..(16): Xaa is Aib
HSXGTFTSDYSKYLDXRRASDFVSWLLDE

SEQ ID NO: 1256 - protein, 29 aa, Artificial Sequence
  Synthetic polypeptide
  MOD_RES (3)..(3): Xaa is Acetyldiaminobutanoic acid
  MOD_RES (16)..(16): Xaa is Aib
HSXGTFTSDYSKYLDXRRATDFVTWLLDE

SEQ ID NO: 1257-1258 - skipped (2 entries)

SEQ ID NO: 1259 - protein, 40 aa, Artificial Sequence
  Synthetic peptide
  MOD_RES (2)..(2): Xaa is Aib
  MISC_FEATURE (16)..(20): Lactam bridge links Glu16 and Lys20
  MOD_RES (40)..(40): Epsilon amine of Lys is attached to Ala-Ac-Cys(PEG), wherein the Ac-Cys(PEG) is a Cys residue comprising an alpha amino group capped with an acetyl group (CH3CO) and comprising a 40 kDa PEG covalently attached to its side chain
YXQGTFTSDYSIYLDEQAAKEFVNWLLAGGPSSGAPPPSK

SEQ ID NO: 1260 - protein, 40 aa, Artificial Sequence; identical to SEQ ID NO: 1259
  Synthetic peptide
  MOD_RES (2)..(2): Xaa is Aib
  MISC_FEATURE (16)..(20): Lactam bridge links Glu16 and Lys20
  MOD_RES (40)..(40): Epsilon amine of Lys is attached to Arg-Ac-Cys(PEG), wherein the Ac-Cys(PEG) is a Cys residue comprising an alpha amino group capped with an acetyl group (CH3CO) and comprising a 40 kDa PEG covalently attached to its side chain

SEQ ID NO: 1261 - protein, 40 aa, Artificial Sequence; identical to SEQ ID NO: 1071
  Synthetic peptide
  MOD_RES (2)..(2): Xaa is Aib
  MISC_FEATURE (16)..(20): Lactam bridge links Glu16 and Lys20
  MOD_RES (40)..(40): Cys-PEG covalently linked via thioether linkage

SEQ ID NO: 1262 - protein, 40 aa, Artificial Sequence
  Synthetic peptide
  MOD_RES (2)..(2): Xaa is Aib
HXQGTFTSDYSKYLDERRAQDFVQWLMNTGPSSGAPPPSK

SEQ ID NO: 1263 - protein, 40 aa, Artificial Sequence; identical to SEQ ID NO: 1165
  Synthetic peptide
  MISC_FEATURE: MT-345
  MOD_RES (2)..(2): Xaa is Aib
  MOD_RES (40)..(40): Acylated with a C14 fatty acyl group
  MOD_RES (40)..(40): AMIDATION

SEQ ID NO: 1264 - protein, 40 aa, Artificial Sequence; identical to SEQ ID NO: 1165
  Synthetic peptide
  MISC_FEATURE: MT-346
  MOD_RES (2)..(2): Xaa is Aib
  MOD_RES (40)..(40): AMIDATION

SEQ ID NO: 1265 - protein, 40 aa, Artificial Sequence
  Synthetic peptide
  MISC_FEATURE: MT-347
  MOD_RES (2)..(2): Xaa is Aib
  MOD_RES (16)..(16): Xaa is Aib
  MOD_RES (40)..(40): Acylated with a C14 fatty acyl group
  MOD_RES (40)..(40): AMIDATION
HXQGTFTSDYSKYLDXQAAKEFICWLMNGGPSSGAPPPSK

SEQ ID NO: 1266 - protein, 40 aa, Artificial Sequence; identical to SEQ ID NO: 1265
  Synthetic peptide
  MISC_FEATURE: MT-348
  MOD_RES (2)..(2): Xaa is Aib
  MOD_RES (16)..(16): Xaa is Aib
  MOD_RES (40)..(40): AMIDATION

SEQ ID NO: 1267 - protein, 40 aa, Artificial Sequence; identical to SEQ ID NO: 1165
  Synthetic peptide
  MISC_FEATURE: MT-349
  MOD_RES (2)..(2): Xaa is Aib
  MOD_RES (24)..(24): Covalently bound to 40kDa PEG via thioether made by reaction of peptide with haloacetyl-activated PEG
  MOD_RES (40)..(40): Acylated with a C14 fatty acyl group
  MOD_RES (40)..(40): AMIDATION

SEQ ID NO: 1268 - protein, 40 aa, Artificial Sequence; identical to SEQ ID NO: 1165
  Synthetic peptide
  MISC_FEATURE: MT-350
  MOD_RES (2)..(2): Xaa is Aib
  MOD_RES (24)..(24): Covalently bound to 40kDa PEG via thioether made by reaction of peptide with haloacetyl-activated PEG
  MOD_RES (40)..(40): AMIDATION

SEQ ID NO: 1269 - protein, 40 aa, Artificial Sequence; identical to SEQ ID NO: 1265
  Synthetic peptide
  MISC_FEATURE: MT-351
  MOD_RES (2)..(2): Xaa is Aib
  MOD_RES (16)..(16): Xaa is Aib
  MOD_RES (24)..(24): Covalently bound to 40kDa PEG via thioether made by reaction of peptide with haloacetyl-activated PEG
  MOD_RES (40)..(40): Acylated with a C14 fatty acyl group
  MOD_RES (40)..(40): AMIDATION

SEQ ID NO: 1270 - protein, 40 aa, Artificial Sequence; identical to SEQ ID NO: 1265
  Synthetic peptide
  MISC_FEATURE: MT-352
  MOD_RES (2)..(2): Xaa is Aib
  MOD_RES (16)..(16): Xaa is Aib
  MOD_RES (24)..(24): Covalently bound to 40kDa PEG via thioether made by reaction of peptide with haloacetyl-activated PEG
  MOD_RES (40)..(40): AMIDATION

SEQ ID NO: 1271 - skipped

SEQ ID NO: 1272 - protein, 40 aa, Artificial Sequence
  Synthetic peptide
  MISC_FEATURE: MT-361
  MOD_RES (2)..(2): Xaa is Aib
  MOD_RES (16)..(16): Xaa is Aib
  MOD_RES (40)..(40): AMIDATION
HXQGTFTSDYSIYLDXQAAKEFVNWLMNGGPSSGAPPPSK

SEQ ID NO: 1273 - protein, 40 aa, Artificial Sequence; identical to SEQ ID NO: 1272
  Synthetic peptide
  MISC_FEATURE: MT-362
  MOD_RES (2)..(2): Xaa is Aib
  MOD_RES (16)..(16): Xaa is Aib
  MOD_RES (40)..(40): Acylated with a C16 fatty acyl group
  MOD_RES (40)..(40): AMIDATION

SEQ ID NO: 1274 - protein, 40 aa, Artificial Sequence
  Synthetic peptide
  MISC_FEATURE: MT-363
  MOD_RES (2)..(2): Xaa is Aib
  MOD_RES (40)..(40): AMIDATION
HXQGTFTSDYSKYLDEQAAKEFIAWLMNGGPSSGAPPPSK

SEQ ID NO: 1275 - protein, 40 aa, Artificial Sequence; identical to SEQ ID NO: 1274
  Synthetic peptide
  MISC_FEATURE: MT-364
  MOD_RES (2)..(2): Xaa is Aib
  MOD_RES (40)..(40): Acylated with a C16 fatty acyl group
  MOD_RES (40)..(40): AMIDATION

SEQ ID NO: 1276-1300 - skipped (25 entries)

SEQ ID NO: 1301 - protein, 29 aa, Homo sapiens
HSQGTFTSDYSKYLDSRRAQDFVQWLMNT

SEQ ID NO: 1302 - protein, 28 aa, Artificial Sequence
  Synthetic Polypeptide
  MISC_FEATURE: Glucagon analogue
  MISC_FEATURE (8)..(8): Xaa is aspartic acid, glutamic acid, cysteic acid or homocysteic acid
SQGTFTSXYSKYLDSRRAQDFVQWLMNT

SEQ ID NO: 1303 - protein, 27 aa, Artificial Sequence
  Synthetic Polypeptide
  MISC_FEATURE: Glucagon analogue
  MISC_FEATURE (7)..(7): Xaa is aspartic acid, glutamic acid, cysteic acid or homocysteic acid
QGTFTSXYSKYLDSRRAQDFVQWLMNT

SEQ ID NO: 1304 - protein, 26 aa, Artificial Sequence
  Synthetic Polypeptide
  MISC_FEATURE: Glucagon analogue
  MISC_FEATURE (6)..(6): Xaa is aspartic acid, glutamic acid, cysteic acid or homocysteic acid
GTFTSXYSKYLDSRRAQDFVQWLMNT

SEQ ID NO: 1305 - protein, 25 aa, Artificial Sequence
  Synthetic Polypeptide
  MISC_FEATURE: Glucagon analogue
  MISC_FEATURE (5)..(5): Xaa is aspartic acid, glutamic acid, cysteic acid or homocysteic acid
TFTSXYSKYLDSRRAQDFVQWLMNT

SEQ ID NO: 1306 - protein, 24 aa, Artificial Sequence
  Synthetic Polypeptide
  MISC_FEATURE: Glucagon analogue
  MISC_FEATURE (4)..(4): Xaa is glutamic acid, cysteic acid or homocysteic acid
  MISC_FEATURE (22)..(22): Xaa at position 22 is Met, Leu or Nle
FTSXYSKYLDSRRAQDFVQWLXNT

SEQ ID NO: 1307 - protein, 24 aa, Artificial Sequence
  Synthetic Polypeptide
  MOD_RES (1)..(1): N-terminal amino group replaced with hydroxy group
  MISC_FEATURE (4)..(4): Xaa is aspartic acid, glutamic acid, cysteic acid or homocysteic acid
  MISC_FEATURE (22)..(22): Xaa is Met, Leu or Nle
FTSXYSKYLDSRRAQDFVQWLXNT

SEQ ID NO: 1308 - protein, 24 aa, Artificial Sequence
  Synthetic Polypeptide
  MOD_RES (1)..(1): N-terminal amino group replaced with hydroxy group
  MISC_FEATURE (22)..(22): Xaa is  Met, Leu or Nle
  MOD_RES (24)..(24): C-terminal alpha carboxylate replaced with amide
FTSDYSRYLDSRRAQDFVQWLXNT

SEQ ID NO: 1309 - protein, 24 aa, Artificial Sequence
  Synthetic Polypeptide
  MISC_FEATURE: Glucagon analogue
  MOD_RES (1)..(1): N-terminal amino group replaced with hydroxy group
  MISC_FEATURE (4)..(4): Xaa is aspartic acid, glutamic acid, cysteic acid or homocysteic acid
  MISC_FEATURE (7)..(7): Xaa is Lys or Arg
  MISC_FEATURE (11)..(11): Xaa is Lys, Cys, Orn, homocysteine or acetyl phenyalanine
  MISC_FEATURE (22)..(22): Xaa is Met, Leu or Nle
FTSXYSXYLDXRRAQDFVQWLXNT

SEQ ID NO: 1310 - protein, 24 aa, Artificial Sequence
  Synthetic Polypeptide
  MISC_FEATURE: Glucagon analogue
  MOD_RES (1)..(1): N-terminal amino group replaced with hydroxy group
  MISC_FEATURE (4)..(4): Xaa is aspartic acid, glutamic acid, cysteic acid or homocysteic acid
  MISC_FEATURE (7)..(7): Xaa is is Lys or Arg
  MISC_FEATURE (16)..(16): Xaa is Lys, Cys, Orn, homocysteine or acetyl phenylalanine
  MISC_FEATURE (22)..(22): Xaa is Met, Leu or Nle
FTSXYSXYLDSRRAQXFVQWLXNT

SEQ ID NO: 1311 - protein, 24 aa, Artificial Sequence
  Synthetic Polypetide
  MISC_FEATURE: Glucagon analogue
  MOD_RES (1)..(1): N-terminal amino group replaced with hydroxy group
  MISC_FEATURE (4)..(4): Xaa is aspartic acid, glutamic acid, cysteic acid or homocysteic acid
  MISC_FEATURE (7)..(7): Xaa is Lys or Arg
  MISC_FEATURE (19)..(19): Xaa is Lys, Cys, Orn, homocysteine or acetyl phenylalanine
  MISC_FEATURE (22)..(22): Xaa is Met, Leu or Nle
FTSXYSXYLDSRRAQDFVXWLXNT

SEQ ID NO: 1312 - protein, 24 aa, Artificial Sequence
  Synthetic Polypeptide
  MISC_FEATURE: Glucagon analogue
  MOD_RES (1)..(1): N-terminal amino group replaced with hydroxy group
  MISC_FEATURE (4)..(4): Xaa is aspartic acid, glutamic acid, cysteic acid or homocysteic acid
  MISC_FEATURE (7)..(7): Xaa is Lys or Arg
  MISC_FEATURE (11)..(11): Xaa is Lys, Cys, Orn, homocysteine or acetyl phenylalanine
  MISC_FEATURE (19)..(19): Xaa is Lys, Cys, Orn, homocysteine or acetyl phenylalanine
  MISC_FEATURE (22)..(22): Xaa is Met, Leu or Nle
FTSXYSXYLDXRRAQDFVXWLXNT

SEQ ID NO: 1313 - protein, 24 aa, Artificial Sequence
  Synthetic Polypeptide
  MISC_FEATURE: Glucagon analogue
  MOD_RES (1)..(1): N-terminal amino group replaced with hydroxy group
  MISC_FEATURE (4)..(4): Xaa is aspartic acid, glutamic acid, cysteic acid or homocysteic acid
  MOD_RES (11)..(11): Pegylated
  MISC_FEATURE (22)..(22): Xaa is Met, Leu or Nle
FTSXYSKYLDCRRAQDFVQWLXNT

SEQ ID NO: 1314 - protein, 24 aa, Artificial Sequence
  Synthetic Polypeptide
  MISC_FEATURE: Glucagon analogue
  MOD_RES (1)..(1): N-terminal amino group replaced with hydroxy group
  MISC_FEATURE (4)..(4): Xaa is aspartic acid, glutamic acid, cysteic acid or homocysteic acid
  MOD_RES (19)..(19): Pegylated
  MISC_FEATURE (22)..(22): Xaa is Met, Leu or Nle
FTSXYSKYLDSRRAQDFVCWLXNT

SEQ ID NO: 1315 - protein, 24 aa, Artificial Sequence
  Synthetic Polypeptide
  MISC_FEATURE: Glucagon analogue
  MOD_RES (1)..(1): N-terminal amino group replaced with hydroxy group
  MISC_FEATURE (4)..(4): Xaa is aspartic acid, glutamic acid, cysteic acid or homocysteic acid
  MISC_FEATURE (22)..(22): Xaa is Met, Leu or Nle
  MOD_RES (24)..(24): Pegylated
FTSXYSKYLDSRRAQDFVQWLXNC

SEQ ID NO: 1316 - protein, 24 aa, Artificial Sequence
  Synthetic Polypeptide
  MISC_FEATURE: Glucagon analogue
  MOD_RES (1)..(1): N-terminal amino group replaced with hydroxy group
  MISC_FEATURE (4)..(4): Xaa is aspartic acid, glutamic acid, cysteic acid or homocysteic acid
  MOD_RES (19)..(19): Pegylated
  MISC_FEATURE (22)..(22): Xaa is Met, Leu or Nle
FTSXYSRYLDSRRAQDFVKWLXNT

SEQ ID NO: 1317 - protein, 24 aa, Artificial Sequence
  Synthetic Polypeptide
  MISC_FEATURE: Glucagon analogue
  MOD_RES (1)..(1): N-terminal amino group replaced with hydroxy group
  MISC_FEATURE (4)..(4): Xaa is aspartic acid, glutamic acid, cysteic acid or homocysteic acid
  MOD_RES (11)..(11): Pegylated
  MISC_FEATURE (22)..(22): Xaa is Met, Leu or Nle
FTSXYSKYLDCRRAQDFVCWLXNT

SEQ ID NO: 1318 - protein, 24 aa, Artificial Sequence
  Synthetic Polypeptide
  MISC_FEATURE: Glucagon analogue
  MOD_RES (1)..(1): N-terminal amino group replaced with hydroxy group
  MISC_FEATURE (4)..(4): Xaa is aspartic acid, glutamic acid, cysteic acid or homocysteic acid
  MISC_FEATURE (22)..(22): Xaa is Met, Leu or Nle
  MOD_RES (24)..(24): C-terminal alpha carboxylate replaced with amide
FTSXYSKYLECRRAQDFVQWLXNT

SEQ ID NO: 1319 - protein, 10 aa, Artificial Sequence
  Synthetic Polypeptide
  MISC_FEATURE: Peptide fragment representing the carboxy terminal 10 amino acids of Exendin-4
GPSSGAPPPS

SEQ ID NO: 1320 - protein, 8 aa, Artificial Sequence
  Synthetic Polypeptide
  MISC_FEATURE: Peptide fragment representing the carboxy terminal 8 amino acids of oxyntomodulin
KRNRNNIA

SEQ ID NO: 1321 - protein, 4 aa, Artificial Sequence
  Synthetic Polypeptide
  MISC_FEATURE: Peptide fragment representing the carboxy 4 amino acids of oxyntomodulin carboxy terminus
KRNR

SEQ ID NO: 1322 - protein, 24 aa, Artificial Sequence
  Synthetic Polypeptide
  MISC_FEATURE: Glucagon analogue
  MISC_FEATURE (7)..(7): Xaa is Lys or Arg
  MISC_FEATURE (11)..(11): Xaa is Lys, Cys, Orn, homocycstein or acetyl phenyalanine
  MISC_FEATURE (19)..(19): Xaa is Lys, Cys, Orn, homocycstein or acetyl phenyalanine
FTSRYSXYLDXRRAQDFVXWLMNT

SEQ ID NO: 1323 - protein, 34 aa, Artificial Sequence
  Synthetic Polypeptide
  MISC_FEATURE: Glucagon analogue
  MISC_FEATURE (4)..(4): Xaa is aspartic acid, glutamic acid, cysteic acid or homocysteic acid
  MISC_FEATURE (7)..(7): Xaa is Lys or Arg
  MISC_FEATURE (16)..(16): Xaa is Lys, Cys, Orn, homocysteine or acetyl phenylalanine
  MISC_FEATURE (22)..(22): Xaa is Met, Leu or Nle
FTSXYSXYLDSRRAQXFVQWLXNTGPSSGAPPPS

SEQ ID NO: 1324 - protein, 32 aa, Artificial Sequence
  Synthetic Polypeptide
  MISC_FEATURE: Glucagon analogue
  MISC_FEATURE (4)..(4): Xaa is aspartic acid, glutamic acid, cysteic acid or homocysteic acid
  MISC_FEATURE (7)..(7): Xaa is Lys or Arg
  MISC_FEATURE (19)..(19): Xaa is Lys, Cys, Orn, homocysteine or acetyl phenylalanine
  MOD_RES (19)..(19): Pegylated
  MISC_FEATURE (22)..(22): Xaa is Met, Leu or Nle
FTSXYSXYLDSRRAQDFVXWLXNTKRNRNNIA

SEQ ID NO: 1325 - protein, 34 aa, Artificial Sequence
  Synthetic Polypeptide
  MISC_FEATURE: Glucagon analogue
  MISC_FEATURE (4)..(4): Xaa is aspartic acid, glutamic acid, cysteic acid or homocysteic acid
  MISC_FEATURE (7)..(7): Xaa is Lys or Arg
  MISC_FEATURE (19)..(19): Xaa is Lys, Cys, Orn, homocysteine or acetyl phenylalanine
  MOD_RES (19)..(19): Pegylated
  MISC_FEATURE (22)..(22): Xaa is Met, Leu or Nle
FTSXYSXYLDSRRAQDFVXWLXNTGPSSGAPPPS

SEQ ID NO: 1326 - protein, 32 aa, Artificial Sequence
  Synthetic Polypeptide
  MISC_FEATURE: Glucagon analogue
  MISC_FEATURE (4)..(4): Xaa is aspartic acid, glutamic acid, cysteic acid or homocysteic acid
  MISC_FEATURE (7)..(7): Xaa is Lys or Arg
  MISC_FEATURE (16)..(16): Xaa is Lys, Cys, Orn, homocysteine or acetyl phenylalanine
  MOD_RES (16)..(16): Pegylation
  MISC_FEATURE (22)..(22): Xaa is Met, Leu or Nle
FTSXYSXYLDSRRAQXFVQWLXNTKRNRNNIA

SEQ ID NO: 1327 - protein, 28 aa, Artificial Sequence
  Synthetic Polypeptide
  MISC_FEATURE: Glucagon analogue
  MISC_FEATURE (4)..(4): Xaa is aspartic acid, glutamic acid, cysteic acid or homocysteic acid
  MISC_FEATURE (7)..(7): Xaa is Lys or Arg
  MISC_FEATURE (16)..(16): Xaa is Lys, Cys, Orn, homocysteine or acetyl phenylalanine
  MOD_RES (16)..(16): Pegylated
  MISC_FEATURE (22)..(22): Xaa is Met, Leu or Nle
FTSXYSXYLDSRRAQXFVQWLXNTKRNR

SEQ ID NO: 1328 - protein, 28 aa, Artificial Sequence
  Synthetic Polypeptide
  MISC_FEATURE: Glucagon analogue
  MISC_FEATURE (4)..(4): Xaa is aspartic acid, glutamic acid, cysteic acid or homocysteic acid
  MISC_FEATURE (7)..(7): Xaa is Lys or Arg
  MISC_FEATURE (19)..(19): Xaa is Lys, Cys, Orn, homocysteine or acetyl phenylalanine
  MOD_RES (19)..(19): Pegylated
  MISC_FEATURE (22)..(22): Xaa is Met, Leu or Nle
FTSXYSXYLDSRRAQDFVXWLXNTKRNR

SEQ ID NO: 1329 - protein, 34 aa, Artificial Sequence
  Synthetic Polypeptide
  MISC_FEATURE: Glucagon analogue
  MOD_RES (1)..(1): N-terminal amino group replaced with hydroxy group
  MISC_FEATURE (4)..(4): Xaa is aspartic acid, glutamic acid, cysteic acid or homocysteic acid
  MISC_FEATURE (22)..(22): Xaa is Met, Leu or Nle
FTSXYSKYLDSRRAQDFVQWLXNTGPSSGAPPPS

SEQ ID NO: 1330 - protein, 32 aa, Artificial Sequence
  Synthetic Polypeptide
  MISC_FEATURE: Glucagon analogue
  MOD_RES (1)..(1): N-terminal amino group replaced with hydroxy group
  MISC_FEATURE (4)..(4): Xaa is aspartic acid, glutamic acid, cysteic acid or homocysteic acid
  MISC_FEATURE (22)..(22): Xaa is Met, Leu or Nle
FTSXYSKYLDSRRAQDFVQWLXNTKRNRNNIA

SEQ ID NO: 1331 - protein, 28 aa, Artificial Sequence
  Synthetic Polypeptide
  MISC_FEATURE: Glucagon analogue
  MOD_RES (1)..(1): N-terminal amino group replaced with hydroxy group
  MISC_FEATURE (4)..(4): Xaa is aspartic acid, glutamic acid, cysteic acid or homocysteic acid
  MISC_FEATURE (22)..(22): Xaa is Met, Leu or Nle
FTSXYSKYLDSRRAQCFVQWLXNTKRNR

SEQ ID NO: 1332 - protein, 29 aa, Artificial Sequence
  Synthetic Polypeptide
  MISC_FEATURE: Glucagon analogue
HSQGTFTSDYSKYLDSCRAQDFVQWLMNT

SEQ ID NO: 1333 - protein, 39 aa, Artificial Sequence; identical to SEQ ID NO: 36
  Synthetic Polypeptide
  MISC_FEATURE: Glucagon analogue

SEQ ID NO: 1334 - protein, 29 aa, Artificial Sequence
  Synthetic Polypeptide
  MISC_FEATURE: Glucagon analogue
  MOD_RES (24)..(24): 2-butyrolactone bound through thiol group of Cysteine
HSQGTFTSDYSKYLDSRRAQCFVQWLMNT

SEQ ID NO: 1335 - protein, 29 aa, Artificial Sequence
  Synthetic Polypeptide
  MISC_FEATURE: Glucagon Analogue
  MOD_RES (24)..(24): Carboxymethyl group bound through thiol group of Cysteine
HSQGTFTSDYSKYLDSRRAQCFVQWLMNT

SEQ ID NO: 1336 - protein, 24 aa, Artificial Sequence
  Synthetic Polypeptide
  MISC_FEATURE: Glucagon analogue
  MOD_RES (1)..(1): N-terminal amino group replaced with hydroxy group
  MISC_FEATURE (4)..(4): Xaa is aspartic acid, glutamic acid, cysteic acid or homocysteic acid
  MISC_FEATURE (22)..(22): Xaa is Met, Leu or Nle
FTSXYSKYLESRRAQDFVQWLXNT

SEQ ID NO: 1337 - protein, 24 aa, Artificial Sequence
  Synthetic Polypeptide
  MISC_FEATURE: Glucagon analogue
  MOD_RES (1)..(1): N-terminal amino group replaced with hydroxy group
  MISC_FEATURE (22)..(22): Xaa is Met, Leu or Nle
FTSDYSKYLDSRRAQDFVQWLXNT

SEQ ID NO: 1338 - protein, 24 aa, Artificial Sequence
  Synthetic Polypeptide
  MISC_FEATURE: Glucagon analogue
  MOD_RES (1)..(1): N-terminal amino group replaced with hydroxy group
  MISC_FEATURE (22)..(22): Xaa is Met, Leu or Nle
FTSDYSKYLESRRAQDFVQWLXNT

SEQ ID NO: 1339 - protein, 24 aa, Artificial Sequence
  Synthetic Polypeptide
  MISC_FEATURE: Glucagon analogue
  MISC_FEATURE (1)..(1): N-terminal amino group replaced with hydroxy group
  MISC_FEATURE (4)..(4): Xaa is aspartic acid, glutamic acid, cysteic acid or homocysteic acid
  MISC_FEATURE (22)..(22): Xaa is Met, Leu or Nle
  MISC_FEATURE (23)..(23): Xaa is Asn, Asp, Glu, cysteic acid or homocysteic acid
  MISC_FEATURE (24)..(24): Xaa id Thr, Asp, Glu, cysteic acid or homocysteic acid
FTSXYSKYLDSRRAQDFVQWLXXX

SEQ ID NO: 1340 - protein, 24 aa, Artificial Sequence
  Synthetic Polypeptide
  MISC_FEATURE: Glucagon analogue
  MOD_RES (1)..(1): N-terminal amino group replaced with hydroxy group
  MISC_FEATURE (4)..(4): Xaa is aspartic acid, glutamic acid, cysteic acid or homocysteic acid
  MISC_FEATURE (10)..(10): Xaa is Glu, cysteic acid, homoglutamic acid or homocysteic acid
  MISC_FEATURE (22)..(22): Xaa is Met, Leu or Nle
  MISC_FEATURE (23)..(23): Xaa is Asn or an acidic amino acid
  MISC_FEATURE (24)..(24): Xaa is Thr or an acidic amino acid
FTSXYSKYLXSRRAQDFVQWLXXX

SEQ ID NO: 1341 - protein, 24 aa, Artificial Sequence
  Synthetic Polypeptide
  MISC_FEATURE: Glucagon analogue
  MOD_RES (1)..(1): N-terminal amino group replaced with hydroxy group
  MISC_FEATURE (4)..(4): Xaa is aspartic acid, glutamic acid, cysteic acid or homocysteic acid
  MISC_FEATURE (10)..(10): Xaa is Glu, cysteic acid, homoglutamic acid or homocysteic acid
  MISC_FEATURE (22)..(22): Xaa is Met, Leu or Nle
  MISC_FEATURE (23)..(23): Xaa is Asn, Asp or Glu
  MISC_FEATURE (24)..(24): Xaa is Thr, glu or Asp
FTSXYSKYLXSRRAQDFVQWLXXX

SEQ ID NO: 1342 - protein, 24 aa, Artificial Sequence
  Synthetic Polypeptide
  MISC_FEATURE: Glucagon analogue
  MOD_RES (1)..(1): N-terminal amino group replaced with hydroxy group
  MISC_FEATURE (4)..(4): Xaa is aspartic acid, glutamic acid, cysteic acid or homocysteic acid
  MISC_FEATURE (10)..(10): Xaa is Glu, cysteic acid, homoglutamic acid or homocysteic acid
  MISC_FEATURE (22)..(22): Xaa is Met, Leu or Nle
  MISC_FEATURE (23)..(23): Xaa is Asn or an acidic amino acid
  MISC_FEATURE (24)..(24): Xaa is Thr or an acidic amino acid
FTSXYSKYLXSRRAQDFVQWLXXX

SEQ ID NO: 1343 - protein, 24 aa, Artificial Sequence
  Synthetic Polypeptide
  MISC_FEATURE: Glucagon analogue
  MOD_RES (1)..(1): N-terminal amino group replaced with hydroxy group
  MISC_FEATURE (4)..(4): Xaa is aspartic acid, glutamic acid, cysteic acid or homocysteic acid
  MISC_FEATURE (10)..(10): Xaa is Asp, Glu, cysteic acid, homoglutamic acid or homocysteic acid
  MOD_RES (11)..(11): 20kDa PEG group attached to Xaa at position 11
  MISC_FEATURE (22)..(22): Xaa is Met, Leu or Nle
  MISC_FEATURE (23)..(23): Xaa is Asn or an acidic amino acid
  MISC_FEATURE (24)..(24): Xaa is Thr or an acidic amino acid
FTSXYSKYLXCRRAQDFVQWLXXX

SEQ ID NO: 1344 - protein, 24 aa, Artificial Sequence
  Synthetic Polypeptide
  MISC_FEATURE: Glucagon analogue
  MOD_RES (1)..(1): N-terminal amino group replaced with hydroxy group
  MISC_FEATURE (4)..(4): Xaa is aspartic acid, glutamic acid, cysteic acid or homocysteic acid
  MISC_FEATURE (10)..(10): Xaa is Asp, Glu, cysteic acid, homoglutamic acid or homocysteic acid
  MOD_RES (16)..(16): 20kDa PEG group attached to Xaa at position 16
  MISC_FEATURE (22)..(22): Xaa is Met, Leu or Nle
  MISC_FEATURE (23)..(23): Xaa is Asn or an acidic amino acid
  MISC_FEATURE (24)..(24): Xaa is Thr or an acidic amino acid
FTSXYSKYLXSRRAQCFVQWLXXX

SEQ ID NO: 1345 - protein, 24 aa, Artificial Sequence
  Synthetic Polypeptide
  MISC_FEATURE: Glucagon analogue
  MOD_RES (1)..(1): N-terminal amino group replaced with hydroxy group
  MISC_FEATURE (4)..(4): Xaa is aspartic acid, glutamic acid, cysteic acid or homocysteic acid
  MISC_FEATURE (10)..(10): Xaa is Asp, Glu, cysteic acid, homoglutamic acid or homocysteic acid
  MOD_RES (19)..(19): Pegylated
  MISC_FEATURE (22)..(22): Xaa is Met, Leu or Nle
  MISC_FEATURE (23)..(23): Xaa is Asn or an acidic amino acid
  MISC_FEATURE (24)..(24): Xaa is Thr or an acidic amino acid
FTSXYSKYLXSRRAQDFVCWLXXX

SEQ ID NO: 1346 - protein, 35 aa, Artificial Sequence
  Synthetic Polypeptide
  MISC_FEATURE: Glucagon analogue
  MOD_RES (1)..(1): N-terminal amino group replaced with hydroxy group
  MISC_FEATURE (4)..(4): Xaa is aspartic acid, glutamic acid, cysteic acid or homocysteic acid
  MISC_FEATURE (10)..(10): Xaa is Asp, Glu, cysteic acid, homoglutamic acid or homocysteic acid
  MISC_FEATURE (22)..(22): Xaa is Met, Leu or Nle
  MISC_FEATURE (23)..(23): Xaa is Asn or an acidic amino acid
  MISC_FEATURE (24)..(24): Xaa is Thr or an acidic amino acid
  MISC_FEATURE (25)..(25): Xaa is Lys, Cys, Orn, homocycstein or acetyl phenyalanine
  MOD_RES (25)..(25): Pegylated
FTSXYSKYLXSRRAQDFVQWLXXXXGPSSGAPPPS

SEQ ID NO: 1347 - protein, 35 aa, Artificial Sequence
  Synthetic Polypeptide
  MISC_FEATURE: Glucagon analogue
  MOD_RES (1)..(1): N-terminal amino group replaced with hydroxy group
  MISC_FEATURE (4)..(4): Xaa is aspartic acid, glutamic acid, cysteic acid or homocysteic acid
  MISC_FEATURE (10)..(10): Xaa is Asp, Glu, cysteic acid, homoglutamic acid or homocysteic acid
  MISC_FEATURE (22)..(22): Xaa is Met, Leu or Nle
  MISC_FEATURE (23)..(23): Xaa is Asn or an acidic amino acid
  MISC_FEATURE (24)..(24): Xaa is Thr or an acidic amino acid
  MISC_FEATURE (35)..(35): Xaa is Lys, Cys, Orn, homocysteine or acetyl phenyalanine
  MOD_RES (35)..(35): Pegylated
FTSXYSKYLXSRRAQDFVQWLXXXGPSSGAPPPSX

SEQ ID NO: 1348 - protein, 39 aa, Artificial Sequence; identical to SEQ ID NO: 39
  Synthetic Polypeptide
  MISC_FEATURE: Glucagon analogue

SEQ ID NO: 1349 - protein, 35 aa, Artificial Sequence
  Synthetic Polypeptide
  MISC_FEATURE: Glucagon analogue
  MOD_RES (1)..(1): N-terminal amino group replaced with hydroxy group
  MISC_FEATURE (4)..(4): Xaa is aspartic acid, glutamic acid, cysteic acid or homocysteic acid
  MISC_FEATURE (7)..(7): Xaa is Lys or Arg
  MISC_FEATURE (22)..(22): Xaa is Met , Leu or Nle
  MISC_FEATURE (35)..(35): Xaa is Lys, Cys, Orn, homocysteine or acetyl phenyalanine
  MOD_RES (35)..(35): Pegylated
FTSXYSXYLDSRRAQDFVQWLXNTGPSSGAPPPSX

SEQ ID NO: 1350 - protein, 24 aa, Artificial Sequence
  Synthetic Polypeptide
  MISC_FEATURE: Glucagon analogue
  MOD_RES (1)..(1): N-terminal amino group replaced with hydroxy group
FTSEYSKYLDSRRAQDFVQWLMNT

SEQ ID NO: 1351 - protein, 20 aa, Artificial Sequence
  Synthetic Polypeptide
  MISC_FEATURE: Glucagon analogue
YSKYLDSRRAQDFVQWLMNT

SEQ ID NO: 1352 - protein, 24 aa, Artificial Sequence
  Synthetic Polypeptide
  MISC_FEATURE: Glucagon analogue
  MISC_FEATURE (4)..(4): Xaa is Homocysteic acid
FTSXYSKYLDSRRAQDFVQWLMNT

SEQ ID NO: 1353 - protein, 11 aa, Artificial Sequence
  Synthetic Polypeptide
  MISC_FEATURE: Peptide fragment representing the carboxy terminal 10 amino acids of Exendin-4
  MISC_FEATURE (11)..(11): Xaa is Lys, Cys, Orn, homocysteine or acetyl phenyalanine
GPSSGAPPPSX

SEQ ID NO: 1354 - protein, 6 aa, Artificial Sequence
  Synthetic Polypeptide
  MISC_FEATURE (6)..(6): Xaa is phenyl lactic acid
HSQGTX

SEQ ID NO: 1355 - protein, 5 aa, Artificial Sequence
  Synthetic Polypeptide
  MISC_FEATURE (5)..(5): Xaa is phenyl lactic acid
SQGTX

SEQ ID NO: 1356 - protein, 4 aa, Artificial Sequence
  Synthetic Polypeptide
  MISC_FEATURE (4)..(4): Xaa is phenyl lactic acid
QGTX

SEQ ID NO: 1357 - protein, 3 aa, Artificial Sequence
  Synthetic Polypeptide
  MISC_FEATURE (3)..(3): Xaa is phenyl lactic acid
GTX

SEQ ID NO: 1358 - protein, 2 aa, Artificial Sequence
  Synthetic Polypeptide
  MISC_FEATURE (2)..(2): Xaa is phenyl lactic acid
TX

SEQ ID NO: 1359 - protein, 6 aa, Artificial Sequence
  Synthetic Polypeptide
  MISC_FEATURE (1)..(1): Xaa is selected from a group consisting of His, D-histidine, alpha, alpha-dimethyl imidiazole acetic acid (DMIA), N-methyl histidine, alpha-methyl histidine, imidazole acetic acid, desaminohistidine, hydroxyl-histidine, acetyl-histidine and
  MISC_FEATURE (2)..(2): Xaa is selected from a group consisting of Ser, D-serine, D-alanine, Val, Gly, N-methyl serine, N-methyl alanine, and aminoisobutyric acid (AIB)
  MISC_FEATURE (3)..(3): Xaa is selected from a group consisting of Glu or Gln
  MISC_FEATURE (6)..(6): Xaa is phenyl lactic acid
XXXGTX

SEQ ID NO: 1360 - protein, 5 aa, Artificial Sequence
  Synthetic Polypeptide
  MISC_FEATURE (1)..(1): Xaa is selected from a group consisting of Ser, D-serine, D-alanine, Val, Gly, N-methyl serine, N-methyl alanine, and aminoisobutyric acid (AIB)
  MISC_FEATURE (2)..(2): Xaa is selected from a group consisting of Glu or Gln
  MISC_FEATURE (5)..(5): Xaa is phenyl lactic acid
XXGTX

SEQ ID NO: 1361 - protein, 4 aa, Artificial Sequence
  Synthetic Polypeptide
  MISC_FEATURE (1)..(1): Xaa is selected from a group consisting of Glu and Gln
  MISC_FEATURE (4)..(4): Xaa is phenyl lactic acid
XGTX

SEQ ID NO: 1362 - protein, 24 aa, Artificial Sequence
  Synthetic Polypeptide
  MOD_RES (1)..(1): N-terminal amino group replaced with hydroxy group
  MOD_RES (24)..(24): C-terminal alpha carboxylate optionally replaced with amide
FTSDYSKYLDSRRAQDFVQWLMDT

SEQ ID NO: 1363 - protein, 28 aa, Artificial Sequence
  Synthetic Polypeptide
  MOD_RES (28)..(28): C-terminal alpha carboxylate optionally replaced with amide
SQGTFTSEYSKYLDSRRAQDFVQWLMNT

SEQ ID NO: 1364 - protein, 28 aa, Artificial Sequence
  Synthetic Polypeptide
  MISC_FEATURE (4)..(5): Threonine in position 4 and phenyl lactic acid in position 5 linked via ester bond
  MISC_FEATURE (5)..(5): Xaa is phenyl lactic acid
  MOD_RES (28)..(28): Optional C-terminal alpha carboxylate replaced with amide
  MOD_RES (28)..(28): C-terminal alpha carboxylate optionally replaced with amide
SQGTXTSEYSKYLDSRRAQDFVQWLMNT

SEQ ID NO: 1365 - protein, 29 aa, Artificial Sequence
  Synthetic Polypeptide
  MISC_FEATURE (5)..(6): Threonine in position 5 and phenyl lactic acid in position 6 linked via ester bond
  MISC_FEATURE (6)..(6): Xaa is phenyl lactic acid
  MOD_RES (29)..(29): C-terminal alpha carboxylate optionally replaced with amide
HSQGTXTSEYSKYLDSRRAQDFVQWLMNT

SEQ ID NO: 1366 - protein, 24 aa, Artificial Sequence
  Synthetic Polypeptide
  MOD_RES (1)..(1): N-terminal amino group replaced with hydroxy group
  MISC_FEATURE (11)..(11): Xaa is amino isobutyric acid
FTSDYSKYLDXRRAQDFVQWLMNT

SEQ ID NO: 1367 - protein, 24 aa, Artificial Sequence
  Synthetic Polypeptide
  MOD_RES (1)..(1): N-terminal amino group replaced with hydroxy group
FTSDYSKYLDERRAQDFVQWLMNT

SEQ ID NO: 1368 - protein, 6 aa, Artificial Sequence
  Synthetic Polypeptide
  MISC_FEATURE (1)..(1): Xaa is selected from a group consisting of His, D-histidine, alpha, alpha-dimethyl imidiazole acetic acid (DMIA), N-methyl histidine, alpha-methyl histidine, imidazole acetic acid, desaminohistidine, hydroxyl-histidine, acetyl-histidine and
  MISC_FEATURE (2)..(2): Xaa is selected from a group consisting of Ser, D-serine, D-alanine, Val, Gly, N-methyl serine, N-methyl alanine, and aminoisobutyric acid (AIB)
  MISC_FEATURE (3)..(3): Xaa is selected from a group consisting of Glu or Gln
XXXTGF

SEQ ID NO: 1369 - protein, 5 aa, Artificial Sequence
  Synthetic Polypeptide
  MISC_FEATURE (1)..(1): Xaa is selected from a group consisting of Ser, D-serine, D-alanine, Val, Gly, N-methyl serine, N-methyl alanine, and aminoisobutyric acid (AIB)
  MISC_FEATURE (2)..(2): Xaa is selected from a group consisting of Glu or Gln
XXTGF

SEQ ID NO: 1370 - protein, 4 aa, Artificial Sequence
  Synthetic Polypeptide
  MISC_FEATURE (1)..(1): Xaa is selected from a group consisting of Glu or Gln
XTGF

SEQ ID NO: 1371 - protein, 24 aa, Artificial Sequence
  Synthetic Polypeptide
  MOD_RES (1)..(1): N-terminal amino group replaced with hydroxy group
  MISC_FEATURE (24)..(24): C-terminal alpha carboxylate optionally replaced with an amide
FTSEYSKYLDSRRAQDFVQWLMNT

SEQ ID NO: 1372-1400 - skipped (29 entries)

SEQ ID NO: 1401 - protein, 29 aa, Homo sapiens
HSQGTFTSDYSKYLDSRRAQDFVQWLMNT

SEQ ID NO: 1402 - protein, 24 aa, Artificial Sequence
  Synthetic Polypeptide
  MISC_FEATURE: Glucagon analogue
  MOD_RES (1)..(1): N-terminal amino group replaced with hydroxy group
FTSDYSKYLDSRRAQDFVQWLMNT

SEQ ID NO: 1403 - protein, 31 aa, Homo sapiens; identical to SEQ ID NO: 50

SEQ ID NO: 1404 - protein, 30 aa, Homo sapiens; identical to SEQ ID NO: 52

SEQ ID NO: 1405 - protein, 24 aa, Artificial Sequence
  Synthetic Polypeptide
  MISC_FEATURE: Glucagon analogue
  MOD_RES (1)..(1): N-terminal amino group replaced with hydroxy group
FTSDYSKYLDERRAQDFVQWLMNT

SEQ ID NO: 1406 - protein, 24 aa, Artificial Sequence
  Synthetic Polypeptide
  MOD_RES (1)..(1): N-terminal amino group replaced with hydroxy group
FTSDYSKYLDERRAKDFVQWLMNT

SEQ ID NO: 1407 - protein, 24 aa, Artificial Sequence
  Synthetic Polypeptide
  MISC_FEATURE: Glucagon analogue
  MOD_RES (1)..(1): N-terminal amino group replaced with hydroxy group
  MISC_FEATURE (11)..(11): Xaa is Ser or Glu
FTSDYSKYLDXRRAKDFVEWLMNT

SEQ ID NO: 1408 - protein, 24 aa, Artificial Sequence
  Synthetic Polypeptide
  MISC_FEATURE: Glucagon analogue
  MOD_RES (1)..(1): N-terminal amino group replaced with hydroxy group
  MISC_FEATURE (11)..(11): Xaa is Ser or Glu
FTSDYSKYLDXRRAQDFVEWLMKT

SEQ ID NO: 1409 - protein, 24 aa, Artificial Sequence
  Synthetic Polypeptide
  MISC_FEATURE: Glucagon analogue
  MOD_RES (1)..(1): N-terminal amino group replaced with hydroxy group
  MISC_FEATURE (7)..(7): Xaa at position 7 is Lys or Glu
  MISC_FEATURE (10)..(10): Xaa is Asp, Glu, homoglutamic acid, cysteic acid or homocysteic acid
  MISC_FEATURE (11)..(11): Xaa is Ala, Ser, Glu, Lys, homoglutamic acid or homocysteic acid
  MISC_FEATURE (15)..(15): Xaa is Gln, Glu or Lys
  MISC_FEATURE (19)..(19): Xaa is Ala, Gln, Lys or Glu
  MISC_FEATURE (23)..(23): Xaa is Asn, Lys or an acidic amino acid
  MISC_FEATURE (24)..(24): Xaa is Thr or an acidic amino acid
FTSDYSXYLXXRRAXDFVXWLMXX

SEQ ID NO: 1410 - protein, 24 aa, Artificial Sequence
  Synthetic Polypeptide
  MISC_FEATURE: Glucagon analogue
  MOD_RES (1)..(1): N-terminal amino group replaced with hydroxy group
  MISC_FEATURE (11)..(11): Xaa is Ala, Ser, Glu, Gln, homoglutamic acid or homocysteic acid
  MISC_FEATURE (15)..(15): Xaa is Gln or Lys
  MISC_FEATURE (19)..(19): Xaa is Ala, Gln or Glu
  MISC_FEATURE (23)..(23): Xaa is Asn, Lys or an acidic amino acid
FTSDYSKYLDXRRAXDFVXWLMXT

SEQ ID NO: 1411 - protein, 24 aa, Artificial Sequence
  Synthetic Polypeptide
  MISC_FEATURE: Glucagon analogue
  MOD_RES (1)..(1): N-terminal amino group replaced with hydroxy group
  MISC_FEATURE (11)..(11): Xaa is Ala, Ser, Glu, Gln, homoglutamic acid or homocysteic acid
  MISC_FEATURE (15)..(15): Xaa is Gln or Lys
FTSDYSKYLDXRRAXDFVQWLMNT

SEQ ID NO: 1412 - protein, 24 aa, Artificial Sequence
  Synthetic Polypeptide
  MISC_FEATURE: Glucagon analogue
  MOD_RES (1)..(1): N-terminal amino group replaced with hydroxy group
  MISC_FEATURE (4)..(4): Xaa is aspartic acid, glutamic acid, cysteic acid or homocysteic acid
  MISC_FEATURE (7)..(7): Xaa is Lys or Arg
  MISC_FEATURE (15)..(15): Xaa is Lys or Gln
  MISC_FEATURE (16)..(16): Xaa is Lys, Cys, Orn, homocysteine or acetyl phenyalanine
  MOD_RES (16)..(16): Pegylated
  MISC_FEATURE (19)..(19): Xaa is Lys, Cys, Orn, homocysteine or acetyl phenylalanine
  MOD_RES (19)..(19): Pegylated
  MISC_FEATURE (22)..(22): Xaa is Met, Leu or Nle
FTSXYSXYLDERRAXXFVXWLXNT

SEQ ID NO: 1413 - protein, 24 aa, Artificial Sequence
  Synthetic Polypeptide
  MISC_FEATURE: Glucagon analogue
  MOD_RES (1)..(1): N-terminal amino group replaced with hydroxy group
  MISC_FEATURE (4)..(4): Xaa is aspartic acid, glutamic acid, cysteic acid or homocysteic acid
  MISC_FEATURE (15)..(15): Xaa is Lys or Gln
  MISC_FEATURE (16)..(16): Xaa is Cys, Orn, homocysteine or acetyl phenyalanine
  MOD_RES (16)..(16): Pegylated
  MISC_FEATURE (22)..(22): Xaa is Met, Leu or Nle
FTSXYSKYLDERRAXXFVQWLXNT

SEQ ID NO: 1414 - protein, 24 aa, Artificial Sequence
  Synthetic Polypeptide
  MISC_FEATURE: Glucagon analogue
  MOD_RES (1)..(1): N-terminal amino group replaced with hydroxy group
  MISC_FEATURE (4)..(4): Xaa is aspartic acid, glutamic acid, cysteic acid or homocysteic acid
  MISC_FEATURE (15)..(15): Xaa is Lys or Gln
  MISC_FEATURE (19)..(19): Xaa is Cys, Orn, homocysteine or acetyl phenylalanine
  MOD_RES (19)..(19): Pegylated
  MISC_FEATURE (22)..(22): Xaa is Met, Leu or Nle
FTSXYSKYLDERRAXDFVXWLXNT

SEQ ID NO: 1415 - protein, 24 aa, Artificial Sequence
  Synthetic Polypeptide
  MISC_FEATURE: Glucagon analogue
  MOD_RES (1)..(1): N-terminal amino group replaced with hydroxy group
  MISC_FEATURE (4)..(4): Xaa is aspartic acid, glutamic acid, cysteic acid, homoglutamic acid or homocysteic acid
  MISC_FEATURE (7)..(7): Xaa is Lys or Glu
  MISC_FEATURE (10)..(10): Xaa is Asp, Glu, cysteic acid, homoglutamic acid or homocysteic acid
  MISC_FEATURE (11)..(11): Xaa is Ala, Ser, Glu, Lys Gln, homoglutamic acid or homocysteic acid
  MISC_FEATURE (15)..(15): Xaa is Arg, Gln, Glu or Lys
  MISC_FEATURE (19)..(19): Xaa is Ala, Gln, Lys or Glu
  MISC_FEATURE (22)..(22): Xaa is Met, Leu or Nle
  MISC_FEATURE (23)..(23): Xaa is Asn, Lys or an acidic amino acid
  MISC_FEATURE (24)..(24): Xaa is Thr or an acidic amino acid
FTSXYSXYLXXRRAXDFVXWLXXX

SEQ ID NO: 1416 - protein, 24 aa, Artificial Sequence
  Synthetic Polypeptide
  MISC_FEATURE: Glucagon analogue
  MOD_RES (1)..(1): N-terminal amino group replaced with hydroxy group
  MISC_FEATURE (7)..(11): Lactam bridge connecting residues 7 and 11
  MISC_FEATURE (10)..(10): Xaa is Glu or Asp
  MISC_FEATURE (22)..(22): Xaa is Met, Leu or Nle
  MISC_FEATURE (23)..(23): Xaa is Asn, Asp or Glu
  MOD_RES (24)..(24): C-terminal alpha carboxylate replaced with amide
FTSDYSKYLXERRAQDFVQWLXXT

SEQ ID NO: 1417 - protein, 24 aa, Artificial Sequence
  Synthetic Polypeptide
  MISC_FEATURE: Glucagon analogue
  MOD_RES (1)..(1): N-terminal amino group replaced with hydroxy group
  MISC_FEATURE (10)..(10): Xaa is Asp or Glu
  MISC_FEATURE (11)..(15): Lactam bridge connecting residues 11 and 15
  MISC_FEATURE (22)..(22): Xaa is Met, Leu or Nle
  MISC_FEATURE (23)..(23): Xaa is Asn, Asp or Glu
  MOD_RES (24)..(24): C-terminal alpha carboxylate replaced with amide
FTSDYSKYLXERRAKDFVQWLXXT

SEQ ID NO: 1418 - protein, 24 aa, Artificial Sequence
  Synthetic Polypeptide
  MISC_FEATURE: Glucagon analogue
  MOD_RES (1)..(1): N-terminal amino group replaced with hydroxy group
  MISC_FEATURE (10)..(10): Xaa is Asp or Glu
  MISC_FEATURE (11)..(11): Xaa is Ser or Glu
  MISC_FEATURE (15)..(19): Lactam bridge connecting residues 15 and 19
  MISC_FEATURE (22)..(22): Xaa is Met, Leu or Nle
  MISC_FEATURE (23)..(23): Xaa is Asn, Asp or Glu
  MOD_RES (24)..(24): C-terminal alpha carboxylate replaced with amide
FTSDYSKYLXXRRAKDFVEWLXXT

SEQ ID NO: 1419 - protein, 24 aa, Artificial Sequence
  Synthetic Polypeptide
  MISC_FEATURE: Glucagon analogue
  MOD_RES (1)..(1): N-terminal amino group replaced with hydroxy group
  MISC_FEATURE (10)..(10): Xaa is Asp or Glu
  MISC_FEATURE (11)..(11): Xaa is Ser or Glu
  MISC_FEATURE (19)..(23): Lactam bridge connecting residues 19 and 23
  MISC_FEATURE (22)..(22): Xaa is Met, Leu or Nle
  MISC_FEATURE (24)..(24): Xaa is Thr or Glu
  MOD_RES (24)..(24): C-terminal alpha carboxylate replaced with amide
FTSDYSKYLXXRRAQDFVEWLXKX

SEQ ID NO: 1420 - protein, 24 aa, Artificial Sequence
  Synthetic Polypeptide
  MISC_FEATURE: Glucagon analogue
  MOD_RES (1)..(1): N-terminal amino group replaced with hydroxy group
  MISC_FEATURE (4)..(4): Xaa is aspartic acid, glutamic acid, cysteic acid or homocysteic acid
  MISC_FEATURE (7)..(7): Xaa is Lys or Glu
  MISC_FEATURE (10)..(10): Xaa is Asp, Glu, cysteic acid, homoglutamic acid or homocysteic acid
  MISC_FEATURE (11)..(11): Xaa is Ala, Ser, Glu, Lys Gln, homoglutamic acid or homocysteine
  MISC_FEATURE (15)..(15): Xaa is Arg, Gln, Glu or Lys
  MISC_FEATURE (19)..(19): Xaa is Ala, Gln, Lys or Glu
  MISC_FEATURE (22)..(22): Xaa is Met, Leu or Nle
  MISC_FEATURE (23)..(23): Xaa is Asn, Lys, Asp, Glu, cysteic acid or homocysteic acid
  MISC_FEATURE (24)..(24): Xaa is Thr, Asp, Glu, cysteic acid and homocysteic acid
FTSXYSXYLXXRRAXDFVXWLXXX

SEQ ID NO: 1421 - protein, 10 aa, Artificial Sequence
  Synthetic Polypeptide
  MISC_FEATURE: Peptide fragment representing the carboxy terminal 10 amino acids of Exendin-4
GPSSGAPPPS

SEQ ID NO: 1422 - protein, 24 aa, Artificial Sequence
  Synthetic Polypeptide
  MISC_FEATURE: Glucagon analogue
  MOD_RES (1)..(1): N-terminal amino group replaced with hydroxy group
  MISC_FEATURE (4)..(4): Xaa is aspartic acid, glutamic acid, cysteic acid or homocysteic acid
  MISC_FEATURE (7)..(11): Lactam bridge connecting residues 7 and 11
  MISC_FEATURE (10)..(10): Xaa is Asp, Glu, cysteic acid, homoglutamic acid and homocysteic acid
  MISC_FEATURE (22)..(22): Xaa is Met, Leu or Nle
FTSXYSKYLXERRAQDFVQWLXNT

SEQ ID NO: 1423 - protein, 24 aa, Artificial Sequence
  Synthetic Polypeptide
  MISC_FEATURE: Glucagon analogue
  MOD_RES (1)..(1): N-terminal amino group replaced with hydroxy group
  MISC_FEATURE (4)..(4): Xaa is aspartic acid, glutamic acid, cysteic acid or homocysteic acid
  MISC_FEATURE (10)..(10): Xaa is Asp, Glu, cysteic acid, homoglutamic acid and homocysteic acid
  MISC_FEATURE (11)..(15): Lactam bridge connecting residues 11 and 15
  MISC_FEATURE (22)..(22): Xaa is Met, Leu or Nle
FTSXYSKYLXERRAKDFVQWLXNT

SEQ ID NO: 1424 - protein, 24 aa, Artificial Sequence
  Synthetic Polypeptide
  MISC_FEATURE: Glucagon analogue
  MOD_RES (1)..(1): N-terminal amino group replaced with hydroxy group
  MISC_FEATURE (4)..(4): Xaa is aspartic acid, glutamic acid, cysteic acid or homocysteic acid
  MISC_FEATURE (10)..(10): Xaa is Asp, Glu, cysteic acid, homoglutamic acid and homocysteic acid
  MISC_FEATURE (15)..(19): Lactam bridge connecting residues 15 and 19
  MISC_FEATURE (22)..(22): Xaa is Met, Leu or Nle
FTSXYSKYLXERRAKDFVEWLXNT

SEQ ID NO: 1425 - protein, 24 aa, Artificial Sequence
  Synthetic Polypeptide
  MISC_FEATURE: Glucagon analogue
  MOD_RES (1)..(1): N-terminal amino group replaced with hydroxy group
  MISC_FEATURE (4)..(4): Xaa is aspartic acid, glutamic acid, cysteic acid or homocysteic acid
  MISC_FEATURE (10)..(10): Xaa is Asp, Glu, cysteic acid, homoglutamic acid and homocysteic acid
  MISC_FEATURE (19)..(24): Lactam bridge connecting residues 19 and 24
  MISC_FEATURE (22)..(22): Xaa is Met, Leu or Nle
FTSXYSKYLXERRAQDFVEWLXKT

SEQ ID NO: 1426 - protein, 8 aa, Artificial Sequence
  Synthetic Polypeptide
  MISC_FEATURE: Peptide fragment representing the carboxy terminal 8 amino acids of oxyntomodulin
KRNRNNIA

SEQ ID NO: 1427 - protein, 4 aa, Artificial Sequence
  Synthetic Polypeptide
  MISC_FEATURE: Peptide fragment representing the carboxy 4 amino acids of oxyntomodulin carboxy terminus
KRNR

SEQ ID NO: 1428 - protein, 34 aa, Artificial Sequence
  Synthetic Polypeptide
  MISC_FEATURE: Glucagon analogue
FTSEYSKYLDERRAQDFVQWLMNTGPSSGAPPPS

SEQ ID NO: 1429 - protein, 34 aa, Artificial Sequence; identical to SEQ ID NO: 1428
  Synthetic Polypeptide
  MISC_FEATURE (7)..(11): Lactam bridge connecting residues 7 and 11

SEQ ID NO: 1430 - protein, 34 aa, Artificial Sequence
  Synthetic Polypeptide
  MISC_FEATURE: Glucagon analogue
  MISC_FEATURE (11)..(15): Lactam bridge connecting residues 11 and 15
FTSEYSKYLDERRAKDFVQWLMNTGPSSGAPPPS

SEQ ID NO: 1431 - protein, 34 aa, Artificial Sequence
  Synthetic Polypeptide
  MISC_FEATURE: Glucagon analogue
  MISC_FEATURE (7)..(11): Lactam bridge connecting residues 7 and 11
FTSDYSKYLDERRAQDFVQWLMNTGPSSGAPPPS

SEQ ID NO: 1432 - protein, 34 aa, Artificial Sequence; identical to SEQ ID NO: 1428
  Synthetic Polypeptide
  MISC_FEATURE: Glucagon analogue
  MOD_RES (1)..(1): N-terminal amino group replaced with hydroxy group
  MISC_FEATURE (7)..(11): Lactam bridge connecting residues 7 and 11

SEQ ID NO: 1433 - protein, 34 aa, Artificial Sequence; identical to SEQ ID NO: 1430
  Synthetic Polypeptide
  MISC_FEATURE: Glucagon analogue
  MOD_RES (1)..(1): N-terminal amino group replaced with hydroxy group
  MISC_FEATURE (11)..(15): Lactam bridge connecting residues 11 and 15

SEQ ID NO: 1434 - protein, 24 aa, Artificial Sequence
  Synthetic Polypeptide
  MISC_FEATURE: Glucagon analogue
  MOD_RES (1)..(1): N-terminal amino group replaced with hydroxy group
FTSDYSKYLDSRRAQDFVQWLMDT

SEQ ID NO: 1435 - protein, 24 aa, Artificial Sequence
  Synthetic Polypeptide
  MISC_FEATURE: Glucagon analogue
  MOD_RES (1)..(1): N-terminal amino group replaced with hydroxy group
  MISC_FEATURE (7)..(11): Lactam bridge connecting residues 7 and 11
FTSEYSKYLDERRAQDFVQWLMNT

SEQ ID NO: 1436 - protein, 24 aa, Artificial Sequence
  Synthetic Polypeptide
  MISC_FEATURE: Glucagon analogue
  MOD_RES (1)..(1): N-terminal amino group replaced with hydroxy group
  MISC_FEATURE (11)..(15): Lactam bridge connecting residues 11 and 15
FTSEYSKYLDERRAKDFVQWLMNT

SEQ ID NO: 1437 - protein, 31 aa, Artificial Sequence
  Synthetic Polypeptide
  MISC_FEATURE: Glucagon analogue
HSQGTFTSDYARYLDARRAREFIKWLVRGRG

SEQ ID NO: 1438 - protein, 24 aa, Artificial Sequence
  Synthetic Polypeptide
  MISC_FEATURE: Glucagon analogue
  MOD_RES (1)..(1): N-terminal amino group replaced with hydroxy group
  MOD_RES (24)..(24): C-terminal alpha carboxylate replaced with amide
FTSDYSKYLDERRAQDFVQWLMNT

SEQ ID NO: 1439 - protein, 24 aa, Artificial Sequence
  Synthetic Polypeptide
  MISC_FEATURE: Glucagon analogue
  MOD_RES (1)..(1): N-terminal amino group replaced with hydroxy group
  MISC_FEATURE (4)..(4): Xaa is aspartic acid, glutamic acid, cysteic acid or homocysteic acid
  MISC_FEATURE (10)..(10): Xaa is Asp, Glu, cysteic acid, homoglutamic acid or homocysteic acid
  MISC_FEATURE (22)..(22): Xaa is Met, Leu or Nle
  MOD_RES (24)..(24): C-terminal alpha carboxylate replaced with amide
FTSXYSKYLXERRAKDFVQWLXNT

SEQ ID NO: 1440 - protein, 29 aa, Artificial Sequence
  Synthetic Polypeptide
  MISC_FEATURE: Glucagon analogue
HSQGTFTSDYSKYLDSCRAQDFVQWLMNT

SEQ ID NO: 1441 - protein, 39 aa, Artificial Sequence; identical to SEQ ID NO: 36
  Synthetic Polypeptide
  MISC_FEATURE: Glucagon Analogue

SEQ ID NO: 1442 - protein, 29 aa, Artificial Sequence
  Synthetic Polypeptide
  MISC_FEATURE: Glucagon analogue
  MOD_RES (24)..(24): 2-butyrolactone bound through thiol group of Cysteine
HSQGTFTSDYSKYLDSRRAQCFVQWLMNT

SEQ ID NO: 1443 - protein, 29 aa, Artificial Sequence
  Synthetic Polypeptide
  MISC_FEATURE: Glucagon Analogue
  MOD_RES (21)..(21): Carboxymethyl group bound through thiol group of Cysteine
HSQGTFTSDYSKYLDSRRAQCFVQWLMNT

SEQ ID NO: 1444 - protein, 39 aa, Homo sapiens
HSQGTFTSDYSRYLDSRRAQDFVQWLRNTGPSSGAPPPS

SEQ ID NO: 1445 - protein, 35 aa, Artificial Sequence; identical to SEQ ID NO: 1346
  Synthetic Polypeptide
  MISC_FEATURE: Glucagon analogue
  MOD_RES (1)..(1): N-terminal amino group replaced with hydroxy group
  MISC_FEATURE (4)..(4): Xaa is aspartic acid, glutamic acid, cysteic acid or homocysteic acid
  MISC_FEATURE (7)..(11): Lactam bridge connecting residues 7 and 11
  MISC_FEATURE (10)..(10): Xaa is Asp, Glu, cysteic acid, homoglutamic acid or homocysteic acid
  MISC_FEATURE (22)..(22): Xaa is Met, Leu or Nle
  MISC_FEATURE (23)..(23): Xaa is Asn, Lys, Asp, Glu, cysteic acid and homocysteic acid
  MISC_FEATURE (24)..(24): Xaa is Thr, Asp, Glu, cysteic acid and homocysteic acid
  MISC_FEATURE (25)..(25): Xaa is Cys, Orn, homocysteine or acetyl phenyalanine
  MOD_RES (25)..(25): Pegylated

SEQ ID NO: 1446 - protein, 35 aa, Artificial Sequence; identical to SEQ ID NO: 1347
  Synthetic Polypeptide
  MISC_FEATURE: Glucagon analogue
  MOD_RES (1)..(1): N-terminal amino group replaced with hydroxy group
  MISC_FEATURE (4)..(4): Xaa is aspartic acid, glutamic acid, cysteic acid or homocysteic acid
  MISC_FEATURE (10)..(10): Xaa is Asp, Glu, cysteic acid, homoglutamic acid or homocysteic acid
  MISC_FEATURE (11)..(15): Lactam bridge connecting residues 11 and 15
  MISC_FEATURE (22)..(22): Xaa is Met, Leu or Nle
  MISC_FEATURE (23)..(23): Xaa is Asn, Lys, Asp, Glu, cysteic acid and homocysteic acid
  MISC_FEATURE (24)..(24): Xaa is Thr, Asp, Glu, cysteic acid and homocysteic acid
  MISC_FEATURE (35)..(35): Xaa is Cys, Orn, homocysteine or acetyl phenyalanine
  MOD_RES (35)..(35): Pegylated

SEQ ID NO: 1447 - protein, 24 aa, Artificial Sequence
  Synthetic Polypeptide
  MISC_FEATURE: Glucagon analogue
  MISC_FEATURE (4)..(4): Xaa is glutamic acid, homoglutamic acid, cysteic acid or homocysteic acid
  MISC_FEATURE (7)..(11): Lactam bridge connecting residues 7 and 11
  MISC_FEATURE (10)..(10): Xaa is Glu or Asp
  MISC_FEATURE (22)..(22): Xaa is Met, Leu or Nle
  MISC_FEATURE (23)..(23): Xaa is Asn, Asp or Glu
FTSXYSKYLXERRAQDFVQWLXXT

SEQ ID NO: 1448 - protein, 24 aa, Artificial Sequence
  Synthetic Polypeptide
  MISC_FEATURE: Glucagon analogue
  MISC_FEATURE (4)..(4): Xaa is glutamic acid, homoglutamic acid,  cysteic acid or homocysteic acid
  MISC_FEATURE (10)..(10): Xaa is Asp or Glu
  MISC_FEATURE (11)..(15): Lactam bridge connecting residues 11 and 15
  MISC_FEATURE (22)..(22): Xaa is Met, Leu or Nle
  MISC_FEATURE (23)..(23): Xaa is Asn, Asp or Glu
FTSXYSKYLXERRAKDFVQWLXXT

SEQ ID NO: 1449 - protein, 23 aa, Artificial Sequence
  Synthetic Polypeptide
  MISC_FEATURE: Glucagon analogue
TSDYSKYLDERRAKDFVQWLMDT

SEQ ID NO: 1450 - protein, 11 aa, Artificial Sequence
  Synthetic Polypeptide
  MISC_FEATURE: Peptide fragment representing the carboxy terminal 10 amino acids of Exendin-4 plus one additional amino acid
  MISC_FEATURE (11)..(11): Xaa is selected form the group consisting of Cys, Orn, Lys, homocysteine and acetyl phenyalanine
GPSSGAPPPSX

SEQ ID NO: 1451 - protein, 24 aa, Artificial Sequence
  Synthetic Polypeptide
  MISC_FEATURE: Glucagon analogue
  MOD_RES (1)..(1): N-terminal amino group replaced with hydroxy group
  MISC_FEATURE (4)..(4): Xaa is aspartic acid, glutamic acid, cysteic acid, homoglutamic acid or homocysteic acid
  MISC_FEATURE (7)..(7): Xaa is Lys or Glu
  MISC_FEATURE (10)..(10): Xaa is Asp, Glu, cysteic acid, homoglutamic acid or homocysteic acid
  MISC_FEATURE (11)..(11): Xaa is Ala, Ser, Glu, Lys Gln, homoglutamic acid or homocysteic acid
  MISC_FEATURE (15)..(15): Xaa is Arg, Gln, Glu or Lys
  MISC_FEATURE (19)..(19): Xaa is Ala, Gln, Lys or Glu
  MISC_FEATURE (22)..(22): Xaa is Met, Leu or Nle
  MISC_FEATURE (23)..(23): Xaa is Asn, Lys or an acidic amino acid
  MISC_FEATURE (24)..(24): Xaa is Thr, Gly or an acidic amino acid
FTSXYSXYLXXRRAXDFVXWLXXX

SEQ ID NO: 1452 - protein, 6 aa, Artificial Sequence
  Synthetic Polypeptide
  MISC_FEATURE (6)..(6): Xaa is phenyl lactic acid
HSQGTX

SEQ ID NO: 1453 - protein, 5 aa, Artificial Sequence
  Synthetic Polypeptide
  MISC_FEATURE (5)..(5): Xaa is phenyl lactic acid
SQGTX

SEQ ID NO: 1454 - protein, 4 aa, Artificial Sequence
  Synthetic Polypeptide
  MISC_FEATURE (4)..(4): Xaa is phenyl lactic acid
QGTX

SEQ ID NO: 1455 - protein, 3 aa, Artificial Sequence
  Synthetic Polypeptide
  MISC_FEATURE (3)..(3): Xaa is phenyl lactic acid
GTX

SEQ ID NO: 1456 - protein, 2 aa, Artificial Sequence
  Synthetic Polypeptide
  MISC_FEATURE (2)..(2): Xaa is phenyl lactic acid
TX

SEQ ID NO: 1457 - protein, 6 aa, Artificial Sequence
  Synthetic Polypeptide
  MISC_FEATURE (1)..(1): Xaa is selected from a group consisting of His, D-histidine, alpha, alpha-dimethyl imidiazole acetic acid (DMIA), N-methyl histidine, alpha-methyl histidine, imidazole acetic acid, desaminohistidine, hydroxyl-histidine, acetyl-histidine and
  MISC_FEATURE (2)..(2): Xaa is selected from a group consisting of Ser, D-serine, D-alanine, Val, Gly, N-methyl serine, N-methyl alanine, and aminoisobutyric acid (AIB)
  MISC_FEATURE (3)..(3): Xaa is selected from a group consisting of Glu or Gln
  MISC_FEATURE (6)..(6): Xaa is phenyl lactic acid
XXXGTX

SEQ ID NO: 1458 - protein, 5 aa, Artificial Sequence
  Synthetic Polypeptide
  MISC_FEATURE (1)..(1): Xaa is selected from a group consisting of Ser, D-serine, D-alanine, Val, Gly, N-methyl serine, N-methyl alanine, and aminoisobutyric acid (AIB)
  MISC_FEATURE (2)..(2): Xaa is selected from a group consisting of Glu or Gln
  MISC_FEATURE (5)..(5): Xaa is phenyl lactic acid
XXGTX

SEQ ID NO: 1459 - protein, 4 aa, Artificial Sequence
  Synthetic Polypeptide
  MISC_FEATURE (1)..(1): Xaa is selected from a group consisting of Glu or Gln
  MISC_FEATURE (4)..(4): Xaa is phenyl lactic acid
XGTX

SEQ ID NO: 1460 - protein, 24 aa, Artificial Sequence
  Synthetic Polypeptide
  MOD_RES (1)..(1): N-terminal amino group replaced with hydroxy group
  MISC_FEATURE (11)..(15): Lactam bridge connecting residues 11 and 15
  MOD_RES (24)..(24): C-terminal alpha carboxylate replaced with amide
FTSDYSKYLDERRAKDFVQWLMDT

SEQ ID NO: 1461 - protein, 24 aa, Artificial Sequence
  Synthetic Polypeptide
  MOD_RES (1)..(1): N-terminal amino group replaced with hydroxy group
  MOD_RES (24)..(24): C-terminal alpha carboxylate replaced with amide
FTSEYSKYLDSRRAQDFVQWLMNT

SEQ ID NO: 1462 - protein, 24 aa, Artificial Sequence
  Synthetic Polypeptide
  MOD_RES (1)..(1): N-terminal amino group replaced with hydroxy group
  MISC_FEATURE (4)..(7): Lactam bridge connecting residues 4 and 7
  MOD_RES (24)..(24): C-terminal alpha carboxylate replaced with amide
FTSEYSKYLDSRRAQDFVQWLMNT

SEQ ID NO: 1463 - protein, 28 aa, Artificial Sequence
  Synthetic Polypeptide
  MISC_FEATURE (15)..(19): Lactam bridge connecting residues 15 and 19
  MOD_RES (28)..(28): C-terminal alpha carboxylate replaced with amide
AEGTFTSEYSKYLDERRAKDFVQWLMDT

SEQ ID NO: 1464 - protein, 28 aa, Artificial Sequence
  Synthetic Polypeptide
  MISC_FEATURE (4)..(5): Threonine in position 4 and phenyl lactic acid in position 5 are linked via ester bond
  MISC_FEATURE (5)..(5): Xaa is phenyl lactic acid
  MISC_FEATURE (15)..(19): Lactam bridge connecting residues 15 and 19
  MOD_RES (28)..(28): C-terminal alpha carboxylate replaced with amide
AEGTXTSDYSKYLDERRAKDFVQWLMDT

SEQ ID NO: 1465 - protein, 28 aa, Artificial Sequence
  Synthetic Polypeptide
  MISC_FEATURE (15)..(19): Lactam bridge connecting residues 15 and 19
  MOD_RES (28)..(28): C-terminal alpha carboxylate replaced with amide
SQGTFTSEYSKYLDERRAKDFVQWLMDT

SEQ ID NO: 1466 - protein, 28 aa, Artificial Sequence
  Synthetic Polypeptide
  MISC_FEATURE (4)..(5): Threonine in position 4 and phenyl lactic acid in position 5 are linked via ester bond
  MISC_FEATURE (5)..(5): Xaa is phenyl lactic acid
  MISC_FEATURE (15)..(19): Lactam bridge connecting residues 15 and 19
  MOD_RES (28)..(28): C-terminal alpha carboxylate replaced with amide
SQGTXTSDYSKYLDERRAKDFVQWLMDT

SEQ ID NO: 1467 - protein, 24 aa, Artificial Sequence
  Synthetic Polypeptide
  MOD_RES (1)..(1): N-terminal amino group replaced with hydroxy group
  MISC_FEATURE (5)..(5): Covalently linked to a cholesterol acid moiety
  MISC_FEATURE (11)..(15): Lactam bridge connecting residues 11 to 15
  MOD_RES (24)..(24): C-terminal alpha carboxylate replaced with amide
FTSDKSKYLDERRAKDFVQWLMDT

SEQ ID NO: 1468 - protein, 25 aa, Artificial Sequence
  Synthetic Polypeptide
  MOD_RES (1)..(1): N-terminal amino group replaced with hydroxy group
  MISC_FEATURE (11)..(15): Lactam bridge connecting residues 11 and 15
  MISC_FEATURE (25)..(25): Covalently linked to a cholesterol acid moiety
  MOD_RES (25)..(25): C-terminal alpha carboxylate replaced with amide
FTSDYSKYLDERRAKDFVQWLMDTK

SEQ ID NO: 1469 - protein, 35 aa, Artificial Sequence
  Synthetic Polypeptide
  MOD_RES (1)..(1): N-terminal amino group replaced with hydroxy group
  MISC_FEATURE (11)..(15): Lactam bridge connectiong residues 11 and 15
  MISC_FEATURE (35)..(35): Covalently linked to a cholesterol acid moiety
  MOD_RES (35)..(35): C-terminal alpha carboxylate replaced with amide
FTSDYSKYLDERRAKDFVQWLMDTGPSSGAPPPSK

SEQ ID NO: 1470 - protein, 28 aa, Artificial Sequence
  Synthetic Polypeptide
  MISC_FEATURE (1)..(1): Xaa is amino isobutyric acid
  MISC_FEATURE (4)..(5): Threonine in position 4 and phenyl lactic acid in position 5 are linked via ester bond
  MISC_FEATURE (5)..(5): Xaa is phenyl lactic acid
  MISC_FEATURE (15)..(19): Lactam bridge connectiong residues 15 and 19
  MOD_RES (28)..(28): C-terminal alpha carboxylate replaced with amide
XEGTXTSDYSKYLDERRAKDFVQWLMDT

SEQ ID NO: 1471 - protein, 34 aa, Artificial Sequence; identical to SEQ ID NO: 1428
  Synthetic Polypeptide
  MOD_RES (34)..(34): C-terminal alpha carboxylate replaced with amide

SEQ ID NO: 1472 - protein, 34 aa, Artificial Sequence; identical to SEQ ID NO: 1428
  Synthetic Polypeptide
  MOD_RES (1)..(1): N-terminal amino group replaced with hydroxy group
  MOD_RES (34)..(34): C-terminal alpha carboxylate replaced with amide

SEQ ID NO: 1473 - protein, 34 aa, Artificial Sequence; identical to SEQ ID NO: 1430
  Synthetic Polypeptide
  MISC_FEATURE (11)..(15): Lactam bridge connecting residues 11 and 15
  MOD_RES (34)..(34): C-terminal alpha carboxylate replaced with amide

SEQ ID NO: 1474 - protein, 34 aa, Artificial Sequence; identical to SEQ ID NO: 1430
  Synthetic Polypeptide
  MOD_RES (1)..(1): N-terminal amino group replaced with hydroxy group
  MISC_FEATURE (11)..(15): Lactam bridge connecting residues 11 and 15
  MOD_RES (34)..(34): C-termincal alpha carboxylate replaced with amide

SEQ ID NO: 1475 - protein, 24 aa, Artificial Sequence
  Synthetic Polypeptide
  MOD_RES (1)..(1): N-terminal amino group replaced with hydroxy group
  MISC_FEATURE (7)..(11): Lactam bridge connecting residues 7 and 11
  MOD_RES (24)..(24): C-terminal alpha carboxylate replaced with amide
FTSDYSKYLDERRAQDFVQWLMDT

SEQ ID NO: 1476 - protein, 24 aa, Artificial Sequence
  Synthetic Polypeptide
  MOD_RES (1)..(1): N-terminal amino group replaced with hydroxy group
  MISC_FEATURE (11)..(15): Lactam bridge connecting residues 11 and 15
  MOD_RES (24)..(24): C-terminal alpha carboxylate replaced with amide
FTSDYSKYLDERRAKDFVQWLMDT

SEQ ID NO: 1477 - protein, 24 aa, Artificial Sequence
  Synthetic Polypeptide
  MOD_RES (1)..(1): N-terminal amino group replaced with hydroxy group
  MISC_FEATURE (15)..(19): Lactam bridge connecting residues 15 and 19
  MOD_RES (24)..(24): C-terminal alpha carboxylate replaced with amide
FTSDYSKYLDERRAKDFVEWLMDT

SEQ ID NO: 1478 - protein, 24 aa, Artificial Sequence
  Synthetic Polypeptide
  MOD_RES (1)..(1): N-terminal amino group replaced with hydroxy group
  MISC_FEATURE (19)..(23): Lactam bridge connecting residues 19 and 23
  MOD_RES (24)..(24): C-terminal alpha carboxylate replaced with amide
FTSDYSKYLDERRAQDFVEWLMKT

SEQ ID NO: 1479 - protein, 24 aa, Artificial Sequence
  Synthetic Polypeptide
  MOD_RES (1)..(1): N-terminal amino group replaced with hydroxy group
  MISC_FEATURE (7)..(11): Lactam bridge connecting residues 7 and 11
  MOD_RES (24)..(24): C-terminal alpha carboxylate replaced with amide
FTSDYSKYLDEQAAKDFIAWLMDT

SEQ ID NO: 1480 - protein, 24 aa, Artificial Sequence
  Synthetic Polypeptide
  MOD_RES (1)..(1): N-terminal amino group replaced with hydroxy group
  MISC_FEATURE (11)..(15): Lactam bridge connecting residues 11 and 15
  MOD_RES (24)..(24): C-terminal alpha carboxylate replaced with amide
FTSDYSKYLDEQAAKEFIAWLMDT

SEQ ID NO: 1481 - protein, 28 aa, Artificial Sequence
  Synthetic Polypeptide
  MISC_FEATURE (15)..(19): Lactam bridge connecting residues 15 and 19
  MOD_RES (28)..(28): C-terminal alpha carboxylate replaced with amide
AEGTFTSEYSKYLDERRAKDFVQWLMDT

SEQ ID NO: 1482 - protein, 28 aa, Artificial Sequence
  Synthetic Polypeptide
  MISC_FEATURE (15)..(19): Lactam bridge connecting residues 15 and 19
  MOD_RES (28)..(28): C-terminal alpha carboxylate replaced with amide
AEGTFTSEYSKYLDEQAAKEFIAWLMDT

SEQ ID NO: 1483 - protein, 29 aa, Artificial Sequence
  Synthetic Polypeptide
  MISC_FEATURE (16)..(20): Lactam bridge connection residues 16 and 20
  MOD_RES (29)..(29): C-terminal alpha carboxylate replaced with amide
HAEGTFTSEYSKYLDERRAKDFVQWLMDT

SEQ ID NO: 1484 - protein, 29 aa, Artificial Sequence
  Synthetic Polypeptide
  MISC_FEATURE (16)..(20): Lactam bridge connecting bridges 16 and 20
  MOD_RES (29)..(29): C-terminal alpha carboxylate replaced with amide
HAEGTFTSEYSKYLDEQAAKEFIAWLMDT

SEQ ID NO: 1485 - protein, 26 aa, Artificial Sequence
  Synthetic Polypeptide
  MISC_FEATURE (13)..(17): Lactam bridge connecting residues 13 and 17
  MOD_RES (26)..(26): C-terminal alpha carboxylate replaced with amide
GTFTSEYSKYLDERRAKDFVQWLMDT

SEQ ID NO: 1486 - protein, 28 aa, Artificial Sequence
  Synthetic Polypeptide
  MISC_FEATURE (5)..(6): Threonine in position 5 and phenyl lactic acid in position 6 linked via ester bond
  MISC_FEATURE (15)..(19): Lactam bridge connecting residues 15 and 19
  MOD_RES (28)..(28): C-terminal alpha carboxylate replaced with amide
SQGTFTSEYSKYLDERRAKDFVQWLMDT

SEQ ID NO: 1487 - protein, 29 aa, Artificial Sequence
  Synthetic Polypeptide
  MISC_FEATURE (5)..(6): Threonine at position 5 and phenyl lactic acid at position 6 linked via ester bond
  MISC_FEATURE (6)..(6): Xaa is phenyl lactic acid
  MISC_FEATURE (16)..(20): Lactam bridge connecting residues 16 and 20
  MOD_RES (29)..(29): C-terminal alpha carboxylate replaced with amide
HAEGTXTSDYSKYLDERRAKDFVQWLMDT

SEQ ID NO: 1488 - protein, 24 aa, Artificial Sequence
  Synthetic Polypeptide
  MOD_RES (1)..(1): N-terminal amino group replaced with hydroxy group
  MISC_FEATURE (7)..(11): Lactam bridge connecting residues 7 and 11
  MOD_RES (19)..(19): Pegylated
  MOD_RES (24)..(24): C-terminal alpha carboxylate replaced with amide
FTSDYSKYLDERRAQDFVCWLMDT

SEQ ID NO: 1489 - protein, 35 aa, Artificial Sequence
  Synthetic Polypeptide
  MOD_RES (1)..(1): N-terminal amino group replaced with hydroxy group
  MISC_FEATURE (7)..(11): Lactam bridge connecting residues 7 and 11
  MOD_RES (35)..(35): Pegylated
  MOD_RES (35)..(35): C-terminal alpha carboxylate replaced with amide
FTSDYSKYLDERRAQDFVQWLMDTGPSSGAPPPSC

SEQ ID NO: 1490 - protein, 24 aa, Artificial Sequence
  Synthetic Polypeptide
  MOD_RES (1)..(1): N-terminal amino group replaced with hydroxy group
  MISC_FEATURE (11)..(15): Lactam bridge connecting residues 11 and 15
  MOD_RES (19)..(19): Pegylated
  MOD_RES (24)..(24): C-terminal alpha carboxylate replaced with amide
FTSDYSKYLDERRAKDFVCWLMDT

SEQ ID NO: 1491 - protein, 35 aa, Artificial Sequence
  Synthetic Polypeptide
  MOD_RES (1)..(1): N-terminal amino group replaced with hydroxy group
  MISC_FEATURE (11)..(15): Lactam bridge connecting residues 11 and 15
  MOD_RES (35)..(35): Pegylated
  MOD_RES (35)..(35): C-terminal alpha carboxylate replaced with amide
FTSDYSKYLDERRAKDFVQWLMDTGPSSGAPPPSC

SEQ ID NO: 1492 - protein, 24 aa, Artificial Sequence
  Synthetic Polypeptide
  MOD_RES (1)..(1): N-terminal amino group replaced with hydroxy group
  MOD_RES (1)..(1): Covalently attached to a C16 fatty acid
  MISC_FEATURE (11)..(15): Lactam bridge connection residues 11 and 15
  MOD_RES (24)..(24): C-terminal alpha carboxylate replaced with amide
FTSDYSKYLDERRAKDFVQWLMDT

SEQ ID NO: 1493 - protein, 24 aa, Artificial Sequence
  Synthetic Polypeptide
  MOD_RES (1)..(1): N-terminal amino group replaced with hydroxy group
  MOD_RES (5)..(5): Linked to a C16 fatty acid via Glu residue
  MISC_FEATURE (11)..(15): Lactam bridge connecting residues 11 and 15
  MISC_FEATURE (15)..(15): Linked to a C16 fatty acid via Glu residue
  MOD_RES (24)..(24): C-terminal alpha carboxylate replaced with amide
FTSDKSKYLDERRAKDFVQWLMDT

SEQ ID NO: 1494 - protein, 24 aa, Artificial Sequence
  Synthetic Polypeptide
  MOD_RES (1)..(1): N-terminal amino group replaced with hydroxy group
  MISC_FEATURE (15)..(15): Linked to C16 fatty acid via Glu residue
  MOD_RES (24)..(24): C-terminal alpha carboxylate replaced with amide
FTSDYSKYLDERRAKDFVQWLMDT

SEQ ID NO: 1495 - protein, 24 aa, Artificial Sequence
  Synthetic Polypeptide
  MOD_RES (1)..(1): N-terminal amino group replaced with hydroxy group
  MISC_FEATURE (11)..(15): Lactam bridge connecting residues 11 and 15
  MISC_FEATURE (19)..(19): Linked to a C16 fatty acid via Glu residue
  MOD_RES (24)..(24): C-terminal alpha carboxylate replaced with amide
FTSDYSKYLDERRAKDFVKWLMDT

SEQ ID NO: 1496 - protein, 24 aa, Artificial Sequence
  Synthetic Polypeptide
  MOD_RES (1)..(1): N-terminal amino group replaced with hydroxy group
  MISC_FEATURE (11)..(15): Lactam bridge connecting residues 11 and 15
  MISC_FEATURE (24)..(24): Linked to a C16 fatty acid via Glu residue
  MOD_RES (24)..(24): C-terminal alpha carboxylate replaced with amide
FTSDYSKYLDERRAKDFVQWLMDK

SEQ ID NO: 1497 - protein, 24 aa, Artificial Sequence
  Synthetic Polypeptide
  MOD_RES (1)..(1): N-terminal amino group replaced with hydroxy group
  MISC_FEATURE (11)..(11): Xaa is amino isobutyric acid
  MOD_RES (24)..(24): C-terminal alpha carboxylate replaced with amide
FTSDYSKYLDXRRAQDFVQWLMNT

SEQ ID NO: 1498 - protein, 24 aa, Artificial Sequence
  Synthetic Polypeptide
  MOD_RES (1)..(1): N-terminal amino group replaced with hydroxy group
  MISC_FEATURE (11)..(11)
  MISC_FEATURE (15)..(15): Xaa is alpha isobutyric acid
  MOD_RES (24)..(24): C-terminal alpha carboxylate replaced with amide
FTSDKSKYLDXRRAXDFVCWLMNT

SEQ ID NO: 1499 - protein, 24 aa, Artificial Sequence
  Synthetic Polypeptide
  MOD_RES (1)..(1): N-terminal amino group replaced with hydroxy group
  MOD_RES (24)..(24): C-terminal alpha carboxylate replaced with amide
FTSDYSKYLDERRAQDFVQWLMNT

SEQ ID NO: 1500 - protein, 24 aa, Artificial Sequence
  Synthetic Polypeptide
  MOD_RES (1)..(1): N-terminal amino group replaced with hydroxy group
  MOD_RES (24)..(24): C-terminal alpha carboxylate replaced with amide
FTSDKSKYLDERRAQDFVCWLMNT

SEQ ID NO: 1501 - protein, 24 aa, Artificial Sequence
  Synthetic Polypeptide
  MISC_FEATURE (4)..(7): Lactam bridge connecting residues 4 and 7
  MOD_RES (11)..(11): Xaa is alpha isobutyric acid
  MOD_RES (24)..(24): C-terminal carboxylate replaced with amide
FTSEYSKYLDXRRAQDFVQWLMNT

SEQ ID NO: 1502 - protein, 24 aa, Artificial Sequence
  Synthetic Polypeptide
  MISC_FEATURE (4)..(7): Lactam bridge connecting residues 4 and 7
  MOD_RES (11)..(11): Xaa is alpha isobutyric acid
  MOD_RES (24)..(24): C-terminal carboxylate replaced with amide
FTSEYSKYLDXRRAQDFVQWLMNT

SEQ ID NO: 1503 - protein, 24 aa, Artificial Sequence
  Synthetic Polypeptide
  MOD_RES (1)..(1): N-terminal amino group replaced with hydroxy group
  MISC_FEATURE (11)..(15): Lactam bridge connecting residues 11 and 15
  MOD_RES (24)..(24): C-terminal alpha carboxylate replaced with amide
FTSDYSKYLDERRAKEFVQWLMDT

SEQ ID NO: 1504 - protein, 24 aa, Artificial Sequence
  Synthetic Polypeptide
  MOD_RES (1)..(1): N-terminal amino group replaced with hydroxy group
  MOD_RES (24)..(24): C-terminal alpha carboxylate replaced with amide
FTSDYSKYLDEQAAKEFIAWLMNT

SEQ ID NO: 1505 - protein, 34 aa, Artificial Sequence; identical to SEQ ID NO: 1430
  Synthetic Polypeptide
  MOD_RES (34)..(34): C-terminal alpha carboxylate replaced with amide

SEQ ID NO: 1506 - protein, 24 aa, Artificial Sequence
  Synthetic Polypeptide
  MOD_RES (1)..(1): N-terminal amino group replaced with hydroxy group
  MISC_FEATURE (5)..(5): Linked to a C16 fatty acid via Glu residue
  MISC_FEATURE (7)..(7): Linked to a C16 fatty acid via Glu residue
  MOD_RES (24)..(24): C-terminal carboxylate replaced with amide
FTSDKSKYLDERRAKDFVQWLMDT

SEQ ID NO: 1507 - protein, 6 aa, Artificial Sequence
  Synthetic Polypeptide
  MISC_FEATURE (1)..(1): Xaa1 is selected from a group consisting of His, D-histidine, alpha, alpha-dimethyl imidiazole acetic acid (DMIA), N-methyl histidine, alpha-methyl histidine, imidazole acetic acid, desaminohistidine, hydroxyl-histidine, acetyl-histidine and
  MISC_FEATURE (2)..(2): Xaa is selected from a group consisting of Ser, D-serine, D-alanine, valine, glycine, N-methyl serine, and aminoisobutyric acid (AIB)
  MISC_FEATURE (3)..(3): Xaa is selected from a group consisting of Glu or Gln
XXXTGF

SEQ ID NO: 1508 - protein, 5 aa, Artificial Sequence
  Synthetic Polypeptide
  MISC_FEATURE (1)..(1): Xaa is selected from a group consisting of Ser, D-serine, D-alanine, valine, glycine, N-methyl serine, and aminoisobutyric acid (AIB)
  MISC_FEATURE (2)..(2): Xaa is selected from a group consisting of Glu or Gln
XXTGF

SEQ ID NO: 1509 - protein, 4 aa, Artificial Sequence
  Synthetic Polypeptide
  MISC_FEATURE (1)..(1): Xaa is selected from a group consisting of Glu or Gln
XTGF

SEQ ID NO: 1510 - protein, 24 aa, Artificial Sequence
  Synthetic Polypeptide
  MOD_RES (1)..(1): N-terminal amino group replaced with hydroxy group
  MOD_RES (24)..(24): C-terminal alpha carboxylate replaced with amide
FTSDYSKYLDSRRAQDFVQWLMDT

SEQ ID NO: 1511 - protein, 28 aa, Artificial Sequence
  Synthetic Polypeptide
  MOD_RES (28)..(28): C-terminal alpha carboxylate replaced with amide
SQGTFTSEYSKYLDSRRAQDFVQWLMNT

SEQ ID NO: 1512 - protein, 28 aa, Artificial Sequence
  Synthetic Polypeptide
  MISC_FEATURE (4)..(5): Threonine at position 4 and phenyl lactic acid at position 5 linked via ester bond
  MISC_FEATURE (5)..(5): Xaa is phenyl lactic acid
  MOD_RES (28)..(28): C-terminal alpha carboxylate replaced with amide
SQGTXTSEYSKYLDSRRAQDFVQWLMNT

SEQ ID NO: 1513 - protein, 29 aa, Artificial Sequence
  Synthetic Polypeptide
  MISC_FEATURE (5)..(6): Threorine at position 5 and phenyl lactic acid at position 6 linked via ester bond
  MISC_FEATURE (6)..(6): Xaa is phenyl lactic acid
  MOD_RES (29)..(29): C-terminal alpha carboxylate replaced with amide
HSQGTXTSEYSKYLDSRRAQDFVQWLMNT

SEQ ID NO: 1514 - protein, 24 aa, Artificial Sequence
  Synthetic Polypeptide
  MOD_RES (1)..(1): N-terminal amino group replaced with hydroxy group
  MISC_FEATURE (11)..(15): Lactam bridge connecting residues 11 and 15
  MOD_RES (19)..(19): Pegylated
  MOD_RES (24)..(24): C-terminal alpha carboxylate replaced with amide
FTSEYSKYLDERRAKDFVCWLMNT

SEQ ID NO: 1515 - protein, 24 aa, Artificial Sequence
  Synthetic Polypeptide
  MOD_RES (1)..(1): N-terminal amino group replaced with hydroxy group
  MISC_FEATURE (11)..(15): Lactam bridge connecting residues 11 and 15
  MISC_FEATURE (19)..(19): Pegylated via spacer
  MOD_RES (24)..(24): C-terminal alpha carboxylate replaced with amide
FTSDYSKYLDERRAKDFVKWLMDT

SEQ ID NO: 1516 - protein, 24 aa, Artificial Sequence
  Synthetic Polypeptide
  MOD_RES (1)..(1): N-terminal amino group replaced with hydroxy group
  MISC_FEATURE (11)..(15): Lactam bridge connecting residues 11 and 15
  MOD_RES (19)..(19): Pegylated via rigid spacer
  MOD_RES (24)..(24): C-terminal alpha carboxylate replaced with amide
FTSDYSKYLDERRAKDFVKWLMDT

SEQ ID NO: 1517 - protein, 35 aa, Artificial Sequence
  Synthetic Polypeptide
  MISC_FEATURE (1)..(1): N-terminal amino group replaced with hydroxy group
  MISC_FEATURE (11)..(15): Lactam bridge connecting residues 11 and 15
  MOD_RES (35)..(35): Pegylated
  MOD_RES (35)..(35): C-terminal alpha carboxylate replaced with amide
FTSDYSKYLDERRAKDFVQWLMDTGPGPGPGPGPC

SEQ ID NO: 1518 - protein, 35 aa, Artificial Sequence
  Synthetic Polypeptide
  MOD_RES (1)..(1): N-terminal amino group replaced with hydroxy group
  MISC_FEATURE (11)..(15): Lactam bridge connecting residues 11 and 15
  MOD_RES (35)..(35): Pegylated
  MOD_RES (35)..(35): C-terminal alpha carboxylate reaplaced with amide
FTSDYSKYLDERRAKDFVQWLMDGGPSSGAPPPSC

SEQ ID NO: 1519-1600 - skipped (82 entries)

SEQ ID NO: 1601 - protein, 29 aa, Homo sapiens
  MOD_RES (29)..(29): C-terminal amidation
HSQGTFTSDYSKYLDSRRAQDPVQWLMNT

SEQ ID NO: 1602 - protein, 24 aa, Artificial Sequence
  Glucagon analog
  MOD_RES (1)..(1): N-terminal amino group replaced with hydroxy group
FTSDYSKYLDSRRAQDFVQWLMNT

SEQ ID NO: 1603 - protein, 31 aa, Homo sapiens; identical to SEQ ID NO: 50

SEQ ID NO: 1604 - protein, 30 aa, Homo sapiens; identical to SEQ ID NO: 52
  MOD_RES (30)..(30): AMIDATION

SEQ ID NO: 1605 - protein, 28 aa, Homo sapiens
HGEGTFTSDLSKQMEEAVRLFIEWLKNG

SEQ ID NO: 1606 - protein, 37 aa, Homo sapiens; identical to SEQ ID NO: 825

SEQ ID NO: 1607 - protein, 42 aa, Homo sapiens; identical to SEQ ID NO: 1004

SEQ ID NO: 1608 - protein, 33 aa, Homo sapiens
HADGSFSDEMNTILDNLAARDFINWLIQTKITD

SEQ ID NO: 1609 - protein, 49 aa, Homo sapiens
YLYQWLGAPVPYPDPLEPRREVCELNPDCDELADHIGFQEAYRRFYGPV

SEQ ID NO: 1610 - protein, 10 aa, Artificial Sequence
  peptide fragment representing the carboxy terminal 10 amino acids of Exendin-4
GPSSGAPPPS

SEQ ID NO: 1611 - protein, 10 aa, Artificial Sequence
  peptide fragment representing the carboxy terminal 10 amino acids of Exendin-4
  MOD_RES (10)..(10): AMIDATION
GPSSGAPPPS

SEQ ID NO: 1612 - protein, 11 aa, Artificial Sequence
  peptide fragment representing the carboxy terminal 10 amino acids of Exendin-4
  MOD_RES (11)..(11): Pegylation
GPSSGAPPPSC

SEQ ID NO: 1613 - protein, 13 aa, Artificial Sequence
  peptide fragment representing the carboxy terminal 13 amino acids of GIP peptide
KGKKNDWKHNITQ

SEQ ID NO: 1614 - protein, 8 aa, Artificial Sequence
  peptide fragment representing the carboxy terminal 8 amino acids of oxyntomodulin
KRNRNNIA

SEQ ID NO: 1615 - protein, 6 aa, Artificial Sequence
  Glucagon analogue
  MOD_RES (6)..(6): C-terminal amide
HTRGTF

SEQ ID NO: 1616 - protein, 6 aa, Artificial Sequence
  glucagon analogue
  MOD_RES (1)..(1): d-histidine
  MOD_RES (2)..(2): d-threonine
  MOD_RES (3)..(3): d-arginine
  MOD_RES (5)..(5): d-threonine
  MOD_RES (6)..(6): d-phenylalanine
  MOD_RES (6)..(6): C-terminal amidation
XXXGXX

SEQ ID NO: 1617 - protein, 30 aa, Artificial Sequence
  glucagon analogue
  MOD_RES (24)..(24): pegylation
HAEGTFTSDVSSYLEGQAAKEFICWLVKGR

SEQ ID NO: 1618 - protein, 39 aa, Heloderma suspectum
HGEGTFTSDLSKQMEEEAVRLFIEWLKNGGPSSGAPPPS

SEQ ID NO: 1619 - protein, 29 aa, Homo sapiens
YADAIFTNSYRKVLGQLSARKLLQDIMSR

SEQ ID NO: 1620 - protein, 28 aa, Homo sapiens
  MOD_RES (28)..(28): AMIDATION
HSDAVFTDNYTRLRKQMAVKKYLNSILN

SEQ ID NO: 1621 - protein, 27 aa, Homo sapiens
HSDGIFTDSYSRYRKQMAVKKYLAAVL

SEQ ID NO: 1622 - protein, 27 aa, Homo sapiens
  MOD_RES (27)..(27): AMIDATION
HADGVFTSDFSKLLGQLSAKKYLESLM

SEQ ID NO: 1623 - protein, 27 aa, Homo sapiens
  MOD_RES (27)..(27): AMIDATION
HSDGTFTSELSRLREGARLQRLLQGLV

SEQ ID NO: 1624 - protein, 30 aa, Artificial Sequence
  Synthetic peptide
  MOD_RES (2)..(2): Xaa is AIB
  MOD_RES (24)..(24): Cys residue linked to 40kDa PEG via maleimide
  MOD_RES (30)..(30): C-terminal amidation
HXQGTFTSDYSKYLDEQAAKEFICWLMNTN

SEQ ID NO: 1625 - protein, 29 aa, Artificial Sequence
  Synthetic peptide
  MOD_RES (2)..(2): Xaa is AIB
  MISC_FEATURE (24)..(24): Covalently bound to 40K PEG via thioether
  MOD_RES (29)..(29): AMIDATION
HXEGTFTSDYSKYLDEQAAKEFICWLMNT

SEQ ID NO: 1626 - protein, 31 aa, Artificial Sequence
  Synthetic peptide
  MOD_RES (1)..(1): d-lysine
  MOD_RES (2)..(2): Sarcosine (N-methyl glycine)
  MOD_RES (4)..(4): Xaa is AIB
  MOD_RES (24)..(24): Covalently bound to 40kDa PEG via thioether
  MOD_RES (31)..(31): AMIDATION
KGHXEGTFTSDYSKYLDEQAAKEFICWLMNT

SEQ ID NO: 1627 - protein, 31 aa, Artificial Sequence; identical to SEQ ID NO: 1626
  Synthetic peptide
  MOD_RES (1)..(1): d-lysine
  MOD_RES (2)..(2): N-hexyl-glycine
  MOD_RES (4)..(4): Xaa is AIB
  MOD_RES (24)..(24): Covalently bound to 40kDa PEG via maleimide
  MOD_RES (31)..(31): AMIDATION

SEQ ID NO: 1628 - protein, 31 aa, Artificial Sequence
  Synthetic peptide
  MOD_RES (1)..(1): d-lysine
  MOD_RES (2)..(2): N-methyl phenylalanine
  MOD_RES (4)..(4): Xaa is AIB
  MOD_RES (24)..(24): Covalently bound to 40kDa PEG via thioether
  MOD_RES (31)..(31): AMIDATION
KFHXEGTFTSDYSKYLDEQAAKEFICWLMNT

SEQ ID NO: 1629 - protein, 29 aa, Artificial Sequence
  Synthetic peptide
  MOD_RES (2)..(2): Xaa is AIB
  MOD_RES (24)..(24): Covalently bound to 40 kDa PEG via maleimide
HXEGTFTSDYSKYLDEQAAKEFICWLMNT

SEQ ID NO: 1630 - protein, 29 aa, Artificial Sequence
  Synthetic peptide
  MOD_RES (1)..(1): Xaa is DMIA
  MISC_FEATURE (16)..(20): Lactam ring between side chains of amino acids
  MOD_RES (24)..(24): Covalently bound to 40kDa PEG via maleimide
  MOD_RES (29)..(29): C-terminal amidation
XSQGTFTSDKSKYLDERRAKDFVCWLMNT

SEQ ID NO: 1631 - protein, 30 aa, Artificial Sequence
  Synthetic peptide
  MOD_RES (30)..(30): C-terminal amidation
HSQGTFTSDYSKYLDEQAAKEFIAWLMNTN

SEQ ID NO: 1632 - protein, 8 aa, Artificial Sequence
  Synthetic peptide
  MOD_RES (1)..(1): Xaa is Phe, hydroxyl-Phe, Gly, hydroxyl-Gly, Ala, Cys, Ser, Lys, Glu, dehydro-Val, Pro, d-Pro, AIB, 1-aminocyclohexanecarboxylic acid, 1-aminocyclopropanecarboxylic acid, N-Me-AIB, alpha-alpha-diethyl-Gly, hydroxyl-AIB, or d-Lys
  MOD_RES (2)..(2): Xaa is Pro, d-Pro, N-methyl-Gly, N-hexyl-Gly, Azetidine-2-carboxylic acid, N-methyl-Ala, or N-methyl-Phe
  MOD_RES (3)..(3): Xaa is His, d-His, Ala, or N-methyl-His
  MOD_RES (8)..(8): C-terminal amidation
XXXSRGTF

SEQ ID NO: 1633 - protein, 31 aa, Artificial Sequence
  Synthetic peptide
  MOD_RES (1)..(1): d-Lys
  MOD_RES (2)..(2): Xaa is Sar
  MOD_RES (4)..(4): Xaa is AIB
  MOD_RES (26)..(26): Covalently bound to PEG via 40kDa maleimide
KXHXEGTFTSDYSKYLDEQAAKEFICWLMNT

SEQ ID NO: 1634 - protein, 32 aa, Artificial Sequence
  Synthetic peptide
  MOD_RES (1)..(1): d-Lys
  MOD_RES (2)..(2): Xaa is Sar
  MOD_RES (4)..(4): Xaa is AIB
  MOD_RES (26)..(26): Cys residue linked to 40kDa PEG via maleimide
  MOD_RES (32)..(32): C-terminal amidation
KXHXQGTFTSDYSKYLDEQAAKEFICWLMNTN

SEQ ID NO: 1635 - protein, 31 aa, Artificial Sequence
  Synthetic peptide
  MOD_RES (1)..(1): d-Lys
  MOD_RES (2)..(2): Xaa is Sar
  MOD_RES (3)..(3): Xaa is DMIA
  MISC_FEATURE (18)..(22): Lactam ring between side chains of amino acids
  MOD_RES (26)..(26): Covalently bound to 40kDa PEG via maleimide
  MOD_RES (31)..(31): C-terminal amidation
KXXSQGTFTSDKSKYLDERRAKDFVCWLMNT

SEQ ID NO: 1636 - protein, 31 aa, Artificial Sequence; identical to SEQ ID NO: 1626
  Synthetic peptide
  MOD_RES (1)..(1): d-Lys
  MOD_RES (2)..(2): N-hexyl-Gly
  MOD_RES (4)..(4): Xaa is AIB
  MISC_FEATURE (26)..(26): Covalently bound to 40K PEG via thioether
  MOD_RES (31)..(31): AMIDATION

SEQ ID NO: 1637 - protein, 32 aa, Artificial Sequence
  Synthetic peptide
  MOD_RES (1)..(1): d-Lys
  MOD_RES (2)..(2): N-hexyl-Gly
  MOD_RES (4)..(4): Xaa is AIB
  MOD_RES (26)..(26): Cys residue linked to 40kDa PEG via maleimide
  MOD_RES (32)..(32): C-terminal amidation
KGHXQGTFTSDYSKYLDEQAAKEFICWLMNTN

SEQ ID NO: 1638 - protein, 31 aa, Artificial Sequence
  Synthetic peptide
  MOD_RES (1)..(1): d-Lys
  MOD_RES (2)..(2): N-hexyl-Gly
  MOD_RES (3)..(3): Xaa is DMIA
  MISC_FEATURE (18)..(22): Lactam ring between side chains of amino acids
  MOD_RES (26)..(26): Covalently bound to 40kDa PEG via maleimide
  MOD_RES (31)..(31): C-terminal amidation
KGXSQGTFTSDKSKYLDERRAKDFVCWLMNT

SEQ ID NO: 1639 - protein, 31 aa, Artificial Sequence; identical to SEQ ID NO: 1628
  Synthetic peptide
  MOD_RES (1)..(1): d-Lys
  MOD_RES (2)..(2): N-methyl-Phe
  MOD_RES (4)..(4): Xaa is AIB
  MOD_RES (26)..(26): Covalently bound to 40kDa PEG via maleimide

SEQ ID NO: 1640 - protein, 32 aa, Artificial Sequence
  Synthetic peptide
  MOD_RES (1)..(1): d-Lys
  MOD_RES (2)..(2): N-methyl-Phe
  MOD_RES (4)..(4): Xaa is AIB
  MOD_RES (26)..(26): Cys residue linked to 40kDa PEG via maleimide
  MOD_RES (32)..(32): C-terminal amidation
KFHXQGTFTSDYSKYLDEQAAKEFICWLMNTN

SEQ ID NO: 1641 - protein, 31 aa, Artificial Sequence
  Synthetic peptide
  MOD_RES (1)..(1): d-Lys
  MOD_RES (2)..(2): N-methyl-Phe
  MOD_RES (3)..(3): Xaa is DMIA
  MISC_FEATURE (18)..(22): Lactam ring between side chains of amino acids
  MOD_RES (26)..(26): Covalently bound to 40kDa PEG via maleimide
  MOD_RES (31)..(31): C-terminal amidation
KFXSQGTFTSDKSKYLDERRAKDFVCWLMNT

SEQ ID NO: 1642 - protein, 27 aa, Artificial Sequence
  Synthetic peptide
HADGVFTSDFSKLLGQLSAKKYLESLM

SEQ ID NO: 1643 - protein, 4 aa, Artificial Sequence
  Synthetic peptide
KRNR

SEQ ID NO: 1644 - protein, 100 aa, Homo sapiens
MRALTLLALLALAALCIAGQAGAKPSGAESSKGAAFVSKQEGSEVVKRPRRYLYQWLGAPVPYPDPLEPRREVCELNPDCDELADHIGFQEAYRRFYGPV

SEQ ID NO: 1645 - protein, 32 aa, Homo sapiens
CGNLSTCMLGTYTQDFNKFHTFPQTAIGVGAP

SEQ ID NO: 1646 - protein, 37 aa, Homo sapiens [sequence omitted]

SEQ ID NO: 1647 - protein, 40 aa, Artificial Sequence
  Synthetic peptide
  MOD_RES (2)..(2): Xaa is AIB
  MOD_RES (40)..(40): C-terminal amidation
HXEGTFTSDVSSYLEEQAAKEFIAWLVKGGPSSGAPPPSK

SEQ ID NO: 1648 - protein, 40 aa, Artificial Sequence
  Synthetic peptide
  MOD_RES (2)..(2): Xaa is AIB
  MISC_FEATURE (40)..(40): C-terminal amidation
HXEGTFTSDVSSYLEGQAAKEAIAWLVKGGPSSGAPPPSK

SEQ ID NO: 1649 - protein, 40 aa, Artificial Sequence
  Synthetic peptide
  MOD_RES (1)..(1): D-Ala
  MOD_RES (2)..(2): Xaa is AIB
  MOD_RES (3)..(3): D-Glu
  MOD_RES (5)..(5): D-Thr
  MOD_RES (6)..(6): D-Phe
  MOD_RES (7)..(7): D-Thr
  MOD_RES (8)..(8): D-Ser
  MOD_RES (9)..(9): D-Asp
  MOD_RES (10)..(10): D-Val
  MOD_RES (11)..(11): D-Ser
  MOD_RES (12)..(12): D-Ser
  MOD_RES (13)..(13): D-Tyr
  MOD_RES (14)..(14): D-Leu
  MOD_RES (15)..(15): D-Glu
  MOD_RES (17)..(17): D-Gln
  MOD_RES (18)..(18): D-Ala
  MOD_RES (19)..(19): D-Ala
  MOD_RES (20)..(20): D-Lys
  MOD_RES (21)..(21): D-Glu
  MOD_RES (22)..(22): D-Ala
  MOD_RES (23)..(23): D-Ile
  MOD_RES (24)..(24): D-Ala
  MOD_RES (25)..(25): D-Trp
  MOD_RES (26)..(26): D-Leu
  MOD_RES (27)..(27): D-Val
  MOD_RES (28)..(28): D-Lys
  MOD_RES (31)..(31): D-Pro
  MOD_RES (32)..(32): D-Ser
  MOD_RES (33)..(33): D-Ser
  MOD_RES (35)..(35): D-Ala
  MOD_RES (36)..(36): D-Pro
  MOD_RES (37)..(37): D-Pro
  MOD_RES (38)..(38): D-Pro
  MOD_RES (39)..(39): D-Ser
  MOD_RES (40)..(40): C-terminal amidation
AXEGTFTSDVSSYLEGQAAKEAIAWLVKGGPSSGAPPPSK

SEQ ID NO: 1650 - protein, 40 aa, Artificial Sequence
  Synthetic peptide
  MOD_RES (2)..(2): Xaa is AIB
  MOD_RES (24)..(24): Covalently bound to 40kDa PEG via thioether
  MOD_RES (40)..(40): C-terminal amidation
HXEGTFTSDVSSYLEEQAAKEFICWLVKGGPSSGAPPPSK

1. A compound comprising the structure Q-L-Y;
wherein Q is a glucagon superfamily peptide;
Y is a GPCR ligand which activates a G protein-coupled receptor with an EC₅₀ of about 1 μM or less, and has a molecular weight of up to about 1000 daltons; and
L is a linking group or a bond.

2. The compound of claim 1, wherein Q exhibits at least 0.1% of the activity of native GLP-1 at the GLP-1 receptor, Q exhibits at least 0.1% of the activity of native glucagon at the glucagon receptor, or Q exhibits at least 0.1% of the activity of native GIP at the GIP receptor, or a combination thereof.

3. (canceled)

4. (canceled)

5. The compound of claim 1, wherein Q has an EC₅₀ at the GLP-1 receptor within 10-fold of the EC₅₀ of Y at the G protein-coupled receptor, Q has an EC₅₀ at the glucagon receptor within 10-fold of the EC₅₀ of Y at the G protein-coupled receptor, or Q has an EC₅₀ at the GIP receptor within 10-fold of the EC₅₀ of Y at the G protein-coupled receptor, or a combination thereof.

6. (canceled)

7. (canceled)

8. The compound of claim 1, wherein Y is a GPCR ligand that acts at a G protein-coupled receptor selected from the group consisting of GPR30, GPR40, GPR119, and GPR120.

9. The compound of claim 1, wherein Y is a GPCR ligand selected from the group consisting of steroids and derivatives thereof, free fatty acids and derivatives thereof, free fatty amides and derivatives thereof, phospholipids and derivatives thereof, grifolic acid and derivatives thereof, diacetylphloroglucinol and derivatives thereof, retinoic acid and derivatives thereof, 4-phenoxymethylpiperidine and derivatives thereof, and thiazolidinedione derivatives.

10. (canceled)

11. The compound of claim 9, wherein L is stable in vivo, hydrolyzable in vivo, or metastable in vivo.

12. (canceled)

13. (canceled)

14. The compound of claim 11, wherein L comprises an ether moiety, an amide moiety, an ester moiety, an acid-labile moiety, a reduction-labile moiety, an enzyme-labile moiety, a hydrazone moiety, a disulfide moiety, or a cathepsin-cleavable moiety.

15. (canceled)

16. (canceled)

17. (canceled)

18. The compound of claim 9, wherein Q comprises an amino acid sequence at least 50% identical to native glucagon that retains the alpha-helix conformation of the amino acids corresponding to amino acids 12-29 of native glucagon (SEQ ID NO: 1601) or an amino acid sequence at least 50% identical to native GLP-1 that retains the alpha-helix conformation of the amino acids corresponding to amino acids 12-29 of native GLP-1 (SEQ ID NO: 1603).

19. (canceled)

20. The compound of claim 9, wherein Q comprises
(I) the amino acid sequence:
X₁-X₂-Gln-Gly-Thr-Phe-Thr-Ser-Asp-Tyr-Ser-Lys-Tyr-Leu-Asp-Ser-Arg-Arg-Ala-Gln-Asp-Phe-Val-Gln-Trp-Leu-Met-Z (SEQ ID NO: 839) with 1 to 3 amino acid modifications thereto,
(a) wherein X₁ and/or X₂ is a non-native amino acid (relative to SEQ ID NO: 1601) that reduces susceptibility of Q to cleavage by dipeptidyl peptidase IV (DPP-IV),
(b) wherein Z is selected from the group consisting of —COOH, -Asn-COOH, Asn-Thr-COOH, and W—COOH, wherein W is 1 to 2 amino acids or GPSSGAPPPS,
(c) wherein Q comprises a modification selected from the group consisting of:
(i) a lactam bridge between the side chains of amino acids at positions i and i+4, wherein i is 12, 16, 20 or 24, and
(ii) one, two, three, or all of the amino acids at positions 16, 20, 21, and 24 is substituted with an α, α-disubstituted amino acid;
wherein Q exhibits glucagon agonist activity
(II) the amino acid sequence of SEQ ID NO: 1601 and comprises:
(a) at least one amino acid modification selected from the group consisting of:
(i) substitution of Thr at position 29 with a charged amino acid;
(ii) substitution of Thr at position 29 with a charged amino acid selected from the group consisting of Lys, Arg, His, Asp, Glu, cysteic acid, and homocysteic acid;
(iii) substitution at position 29 with Asp, Glu, or Lys;
(iv) substitution at position 29 with Glu;
(v) insertion after position 29 of 1 to 3 charged amino acids;
(vi) insertion after position 29 of Glu or Lys;
(vii) insertion after position 29 of Gly-Lys, or Lys-Lys;
(viii) substitution of Gln at position 3 with an amino acid comprising a side chain of Structure I, II, or III: [chemical structure]
wherein R¹ is C₀₋₃ alkyl or C₀₋₃ heteroalkyl; R² is NHR⁴ or C₁₋₃ alkyl; R³ is C₁₋₃ alkyl; R⁴ is H or C₁₋₃ alkyl; X is NH, O, or S; and Y is NHR⁴, SR³, or OR³; and
(ix) a combination thereof;
(b) substitution of Ser at position 16 with Thr, Glu, or Aib; and at least one amino acid modification selected from the group consisting of:
(i) substitution of His at position 1 with a non-native amino acid that reduces susceptibility of the Q to cleavage by dipeptidyl peptidase IV (DPP-IV),
(ii) substitution of Ser at position 2 with a non-native amino acid that reduces susceptibility of the Q to cleavage by dipeptidyl peptidase IV (DPP-IV),
(iii) substitution of Thr at position 7 with Ile, Abu, or Val;
(iv) substitution of Gln at position 20 with Ser, Thr, Ala, Aib, Arg, or Lys;
(v) substitution of Met at position 27 with Leu or Nle;
(vi) deletion of amino acids at positions 28-29;
(vii) deletion of the amino acid at positions 29;
(viii) addition of the amino acid sequence GPSSGAPPPS to the C-terminus; and
(ix) addition of the amino acid sequence GPSSGAPPPSX to the C-terminus, wherein X is any amino acid; and
(x) a combination thereof;
wherein Q exhibits glucagon agonist activity;
(III) a glucagon related peptide of SEQ ID NO: 1601, with the following modifications:
(a) an amino acid modification at position 1 that confers GIP agonist activity,
(b) a modification selected from the group consisting of:
(i) a lactam bridge between the side chains of amino acids at positions i and i+4 or between the side chains of amino acids at positions j and j+3, wherein i is 12, 13, 16, 17, 20 or 24, and wherein j is 17, and
(ii) one, two, three, or all of the amino acids at positions 16, 20, 21, and 24 is substituted with an α,α-disubstituted amino acid,
(c) 1-10 further amino acid modifications;
wherein Q exhibits activity at the GIP receptor;
(IV) the amino acid sequence:
X₁-X₂-Gln-Gly-Thr-Phe-Thr-Ser-Asp-X₃-Ser-X4-Tyr-Leu-X₅-X₆-X₇-X₈-Ala-X₉-X₁₀-Phe-X₁₁-X₁₂-Trp-Leu-X₁₃-X₁₄-X₁₅ (SEQ ID NO: 55), or an analog thereof, wherein said analog differs from SEQ ID NO: 55 by 1 to 3 amino acid modifications, selected from positions 1, 2, 3, 5, 7, 10, 11, 13, 14, 17, 18, 19, 21, and 25, wherein:
(a) X₁ is His, D-His, (Des-amino)His, hydroxyl-His, acetyl-His, homo-His, or alpha, alpha-dimethyl imidazole acetic acid (DMIA), N-methyl His, alpha-methyl His, or imidazole acetic acid;
(b) X₂ is Ser, D-Ser, Ala, D-Ala, Val, Gly, N-methyl Ser, aminoisobutyric acid (Aib) or N-methyl Ala;
(c) X₃, X₄, X₅, X₁₀, X₁₁ and X₁₄ are, individually, any amino acid;
(d) X₆ is Ser, Glu, Gln, homoglutamic acid or homocysteic acid;
(e) X₇ is Arg, Gln, Lys, Cys, Orn, homocysteine or acetyl phenylalanine;
(f) X₈ is Arg, Ala, Lys, Cys, Orn, homocysteine or acetyl phenyalanine;
(g) X₉ is Gln, Lys, Arg, Orn or Citrulline;
(h) X₁₂ is Ala, Gln, Glu, Lys, Cys, Orn, homocysteine or acetyl phenyalanine;
(i) X₁₃ is Met, Leu or Nle;
(j) X₁₅ is Thr, Gly, Lys, Cys, Orn, homocysteine or acetyl phenyalanine; and
optionally comprises one of the following modifications:
(a) deletion of amino acids at positions 28-29;
(b) deletion of the amino acid at positions 29;
(c) addition of the amino acid sequence GPSSGAPPPS to the C-terminus; and
(d) addition of the amino acid sequence GPSSGAPPPSX to the C-terminus, wherein X is any amino acid; and
(e) a combination thereof; or
(v) an amino acid sequence that differs from SEQ ID NO: 1601 by no more than ten amino acid modifications, comprising:
(a) one or more amino acid substitutions with Aib at positions 16, 20, 21, and/or 24, and
(b) an amino acid modification at position 1 and/or 2 that provides reduced susceptibility to cleavage by dipeptidyl peptidase IV, and
optionally comprising one or more of the following modifications:
(a) deletion of amino acids at positions 28 and 29,
(b) deletion of the amino acid at position 29,
(c) addition of the amino acid sequence GPSSGAPPPS to the C-terminus,
(d) addition of the amino acid sequence GPSSGAPPPSX to the C-terminus, wherein X is any amino acid,
(e) substitution of the C-terminal carboxyl group with an amide or carboxylic ester, and
wherein Q exhibits GLP-1 agonist activity and glucagon agonist activity.

21. (canceled)

22. (canceled)

23. The compound of claim 20, wherein in (I) the 1-10 further amino acid modifications are selected from the group consisting of:
(i) substitution of serine at position 2 with D-Ser, Ala, D-Ala, Gly, N-methyl-Ser, Aib, Val, or ε-amino-N-butyric acid;
(ii) substitution of serine at position 16 with Glu, Gln, homoglutamic acid, homocysteic acid, Thr, Gly, or Aib;
(iii) substitution of glutamine at position 20 with Ser, Thr, Ala, Lys, Citrulline, Arg, Orn, or Aib;
(iv) substitution of methionine at position 27 with Leu;
(v) substitution of arginine at position 28 with Ala;
(vi) substitution of threonine at position 29 with Gly;
(vii) a conservative substitution at any of positions 2, 5, 9, 10, 11, 12, 13, 14, 15, 16, 17, 18, 20, 21, 24, 27, 28, and 29;
(viii) addition of 1-21 amino acids to the C-terminus
(ix) addition of the amino acid sequence GPSSGAPPPS to the C-terminus,
(x) addition of the amino acid sequence GPSSGAPPPSX to the C-terminus, wherein X is any amino acid,
(xi) substitution of the C-terminal carboxyl group with an amide or carboxylic ester, and
(xii) a combination thereof.

24. (canceled)

25. (canceled)

26. The compound of claim 9, wherein L-Y is covalently conjugated to the N-terminus, C-terminus, or an amino acid side chain of Q that corresponds to position 10, 30, 37, 38, 39, 40, 41, 42, or 43 of native glucagon (SEQ ID NO: 1601) or a peptide comprising native glucagon.

27. (canceled)

28. (canceled)

29. A prodrug of the compound claim 9 comprising the structure A-B, wherein
A is an amino acid or a hydroxy acid;
B is an N-alkylated amino acid linked to Q through an amide bond between a carboxyl moiety of B and an amine of Q;
A, B, or the amino acid of Q to which A-B is linked is a non-coded amino acid, further wherein the chemical cleavage half-life (t_{1/2}) of A-B from Q is at least about 1 hour to about 1 week in PBS under physiological conditions.

30. The compound of claim 29, wherein A-B comprises the structure: [chemical structure]
wherein
(a) R¹, R², R⁴ and R⁸ are independently selected from the group consisting of H, C1-C18 alkyl, C2-C18 alkenyl, (C1-C18 alkyl)OH, (C1-C18 alkyl)SH, (C2-C3 alkyl)SCH₃, (C1-C4 alkyl)CONH₂, (C1-C4 alkyl)COOH, (C1-C4 alkyl)NH₂, (C1-C4 alkyl)NHC(NH₂⁺)NH₂, (C0-C4 alkyl)(C3-C6 cycloalkyl), (C0-C4 alkyl)(C2-C5 heterocyclic), (C0-C4 alkyl)(C6-C10 aryl)R⁷, (C1-C4 alkyl)(C3-C9 heteroaryl), and C1-C12 alkyl(W1)C1-C12 alkyl, wherein W1 is a heteroatom selected from the group consisting of N, S and O, or
(ii) R¹ and R² together with the atoms to which they are attached form a C3-C12 cycloalkyl or aryl; or
(iii) R⁴ and R⁸ together with the atoms to which they are attached form a C3-C6 cycloalkyl;
(b) R³ is selected from the group consisting of C1-C18 alkyl, (C1-C18 alkyl)OH, (C1-C18 alkyl)NH₂, (C1-C18 alkyl)SH, (C0-C4 alkyl)(C3-C6)cycloalkyl, (C0-C4 alkyl)(C2-C5 heterocyclic), (C0-C4 alkyl)(C6-C10 aryl)R⁷, and (C1-C4 alkyl)(C3-C9 heteroaryl) or R⁴ and R³ together with the atoms to which they are attached form a 4, 5 or 6 member heterocyclic ring;
(c) R⁵ is NHR⁶ or OH;
(d) R⁶ is H, C₁-C₈ alkyl or R⁶ and R² together with the atoms to which they are attached form a 4, 5 or 6 member heterocyclic ring; and
(e) R⁷ is selected from the group consisting of H and OH.

31. The compound of claim 9, further comprising an amino acid side chain on Q covalently attached to an acyl group or an alkyl group via an alkyl amine, amide, ether, ester, thioether, or thioester linkage, which acyl group or alkyl group is non-native to a naturally occurring amino acid.

32. The compound of claim 31, wherein the amino acid to which the acyl or alkyl group is attached is at a position corresponding to position 10, 20, 24, 30, 37, 38, 39, 40, 41, 32, or 43, or the C-terminal amino acid.

33. (canceled)

34. The compound of claim 32, wherein the acyl group or the alkyl group is attached to the side chain of the amino acid through a spacer.

35. (canceled)

36. The compound of claim 9, wherein Q is covalently attached to one or more heterologous moieties.

37. (canceled)

38. The compound of claim 9 wherein Q is selected from the group consisting of SEQ ID NOs: 1-564, 566-570, 573-575, 577, 579-580, 585-612, 616, 618-632, 634-642, 647, 657-692, 694-695, 715-718, 722, 724-725, 729, 731-760, 801-878, 883-919, 1001-1275, 1301-1371, 1401-1518, and 1601-1650.

39. (canceled)

40. A pharmaceutical composition comprising the compound of claim 9, and a pharmaceutically acceptable carrier.

41. A method for treating a disease or medical condition in a patient, wherein the disease or medical condition is selected from the group consisting of metabolic syndrome, diabetes, obesity, liver steatosis, and a neurodegenerative disease, comprising administering to the patient the pharmaceutical composition of claim 40 in an amount effective to treat the disease or medical condition.
